(19) United States
(12) Patent Application Publication
(10) Pub. No.: US 2006/0053516 A1
(43) Pub. Date: Mar. 9, 2006

(54) Genetically modified plants comprising SARS-CoV viral nucleotide sequences and methods of use thereof for immunization against SARS

(75) Inventors: Mee Len Chye, Pokfulam (HK); Hong Ye Li, Guangzhou (CN); Sathiskumar Ramalingam, Hong Kong (HK); Leo Lit Man Poon, Tsuen Wan (HK); Joseph Sriyal Malik Peiris, Pokfulam (HK)

Correspondence Address: COOPER & DUNHAM, LLP, 1185 AVENUE OF THE AMERICAS, NEW YORK, NY, 10036, US

(73) Assignee: The University of Hong Kong

(21) Appl. No.: 11/004,399

(22) Filed: Dec. 3, 2004

Related U.S. Application Data
(60) Provisional application No. 60/527,637, filed on Dec. 5, 2003.

(51) Int. Cl. A61K 39/12; C12N 5/04; A01H 1/00; C12N 15/82; A61K 36/18

(52) U.S. Cl. 800/288; 435/419; 435/468; 424/186.1

(57) ABSTRACT

The invention relates to genetically modified plants and progeny thereof which constitute edible plant-derived mucosal vaccines and injectable plant-derived mucosal vaccines against Severe Acute Respiratory Syndrome (SARS). The invention relates to a recombinant vector that transforms specifically, but not limited to, the nuclei and/or plastids of tobacco, tomato and lettuce plants for antigen production. In specific embodiments, the plastid transformation vector expressing the nucleotide sequences are pCV1, pCV6 and pCV8, and their derivatives containing an S1 with nucleotide (but not amino acid) changes to optimize codon usage for expression in plants. The present invention relates to methods of making the modified plants which comprises transformation of plants with vectors for nuclear expression and/or plastid expression of nucleotide sequences of the SARS-CoV virus, fragments, derivatives, analogs, or variants thereof. The present invention also relates to methods of immunization against SARS and methods of antibody detection using the SARS-CoV antigens generated by the plastid and/or nuclear vector(s) transformed plants.

[0001] This application claims priority of U.S. Ser. No. 60/527,637, filed Dec. 5, 2003, the contents of which are hereby incorporated by reference into this application.

[0002] Throughout this application, certain publications are referenced. Full citations for these publications, as well as additional related references, may be found immediately preceding the claims. The disclosures of these publications are hereby incorporated by reference into this application in order to more fully describe the state of the art as of the date of the invention described and claimed herein.

### BACKGROUND OF THE INVENTION

[0003] Recently, there has been an outbreak of atypical pneumonia in Guangdong province in mainland China. Between November 2002 and March 2003, there were 792 reported cases with 31 fatalities (WHO, Severe Acute Respiratory Syndrome (SARS), Weekly Epidemiol. Rec. (2003) Vol. 78, page 86). In response to this crisis, the Hospital Authority in Hong Kong has increased the surveillance on patients with severe atypical pneumonia. In the course of this investigation, a number of clusters of health care workers with the disease were identified. In addition, there were clusters of pneumonia incidents among persons in close contact with those infected. The disease was unusual in its severity and its progression in spite of the antibiotic treatment typical for the bacterial pathogens that are known to be commonly associated with atypical pneumonia. Some of the present inventors were one of the groups involved in the investigation of these patients. The disease was given the acronym Severe Acute Respiratory Syndrome (“SARS”), which is caused by a novel coronavirus (Peiris et al., 2003, Lancet Vol. 61, pages 1319-25; Fouchier et al., 2003, Nature Vol. 423, page 240) known as the SARS-CoV virus. The SARS-associated coronavirus is distinct from previously characterized members of the family Coronaviridae that cause respiratory and enteric diseases in animals including humans.

[0004] Plants play a critical role as nutrients for animals, including humans, and for the production of substances useful as pharmaceuticals, cosmetics and the like. The generation of transgenic plants by plant nuclear transformation has successfully produced mucosal vaccines against cholera, Norwalk virus, Hepatitis B, foot-and-mouth disease (Walmsley and Arntzen, 2003, Curr. Opin. Biotech. Vol. 14, pages 145-150). Viral antigens expressed in transgenic plants are effective in inducing mucosal and serum immune responses in animals, irrespective of parenteral or oral delivery (Daniell et al., 2001, Trends Plant Sci. Vol. 6, pages 219-226).

[0005] Plastid transformation offers great benefits for recombinant DNA technology. In the plant cell, the mere presence of up to 10,000 more copies of the plastid genome as compared to a nuclear genome, ensures enhanced yield of the plastid-expressed foreign protein, or antigen in the case of vaccine production. Further, maternal inheritance of plastids would result in foreign gene containment due to the lack of pollen transmission (Daniell et al., 2002, Trends Plant Sci. Vol. 7, pages 84-91). Human somatotropin accumulates to 7% total soluble protein, which is 300-fold greater than from nuclear-transformed tobacco (Staub et al., 2000, Plant Journal Vol. 6, pages 547-553), while human serum albumin accumulates to 11.1% total soluble protein, which is 500-fold more than nuclear-transformed leaves (Fernandez-San Millan et al., 2003, Plant Biotech Vol. 1, pages 71-79). The cholera toxin B subunit, the first plant-derived vaccine arising from plastid transformation, accumulates to 4.1% total soluble protein in tobacco leaves (Daniell et al., 2001, J. Mol. Biol. Vol. 311, pages 1001-1009). In comparison, the yield of foreign protein from nuclear-transformed plants rarely exceeds 1% total soluble protein (Daniell et al., 2001, Trends Plant Sci. Vol. 6, pages 219-226).

### SUMMARY OF THE INVENTION

[0006] The present invention is based on the observation of the present inventors that genetically modified plants and progeny thereof expressing SARS-CoV viral antigens can be used as vaccines against SARS. When the genetically modified plants or progeny thereof are ingested by animals, or extracts from genetically modified plants or progeny thereof are injected into or ingested by animals, preferably human, antibodies are generated against the SARS-CoV viral antigens. An edible vaccine against the SARS-CoV virus, deliverable as fruits (e.g., tomato), leaves (e.g., lettuce), tubers (e.g., potato), seeds (e.g., rice or corn), flowers, stems or roots, would obliterate costly purification procedures required of recombinant vaccines from microorganisms. It has further advantages in easy storage, transport and administration by direct ingestion. Also, edible vaccines in the form of fruits, leaves, tubers, seeds, flowers, stems or roots can be grown and easily distributed in developing countries, cutting the costs of immunization programs, and omitting the need for refrigeration and delivery by injection which requires trained health personnel.

[0007] In accordance with the present invention, plant transformation vectors are engineered to provide SARS-CoV viral antigens for eliciting an immune response of an animal for the prevention and treatment of SARS. The antigen includes proteinaceous agent or molecules of the SARS-CoV virus, natural or artificial variants, or mutants thereof. The plant vectors comprising the SARS-CoV viral sequences may be engineered to provide one, two, three or more nucleotide sequences of the SARS-CoV virus. In accordance with the present invention, the antigenic sequences may be derived from the SARS-CoV virus, natural or artificial variants, or mutants thereof.

[0008] The present invention provides plant transformation vectors comprising SARS-CoV nucleotide sequences which encode fragments, derivatives, analogs, or variants of polypeptides of SARS-CoV virus. In a specific embodiment, the invention provides for transgenic and/or transplastomic tobacco plants. The present invention provides modified plants that comprise SARS-CoV antigens, including SARS-CoV viral polypeptides or fragments, derivatives, analogs, or variants thereof, or molecules having similar activities as the polypeptides of the SARS-CoV virus. These activities include functional activities as well as immunogenic abilities. The present invention also provides a method of producing the modified plants which comprises transforming a plant with plastid and/or nuclear transformation vector comprising SARS-CoV viral sequences, fragments, derivatives, analogs, or variants thereof. In preferred embodiments, the present invention provides for modified plants that express less than the entire genome of the SARS-CoV virus. In preferred embodiments, the modified plants provide less than 95%, less than 90%, less than 85%, less than 80%, less than 75%, less than 70%, less than 65%, less than 60%, less than 55%, less than 50%, less than 45%, less than 40%, less than 35%, less than 30%, less than 25%, less than 20%, less than 15%, less than 10%, less than 5%, or less than 1% of the entire genome of SARS-CoV virus. In preferred embodiments, the modified plants provide at least 1, 2, 3, 4, 5, 6, 7, 8, 9, 10, 11, 12 polypeptides, fragments, derivatives, analogs and variants of the SARS-CoV virus.

[0009] In another specific embodiment, the invention provides a vaccine against SARS. The vaccine comprises the modified plant, its proteins, or extracts. The present invention also provides a method of immunization against SARS. The method comprises administering the modified plants to an animal so as to elicit the production of antibodies in the animal against the SARS-CoV viral antigens, which include SARS-CoV viral polypeptides, or fragments, derivatives, analogs, or variants thereof, or molecules having the similar activities as the polypeptide of the SARS-CoV virus.

[0010] In another specific embodiment, plant transformation vectors are engineered to provide SARS-CoV viral antigens for use as reagents in serological tests. One aspect of the invention relates to methods of detecting an antibody to a SARS-CoV viral antigen in a sample by incubating plant-derived SARS-CoV viral antigens with the sample and detecting the presence of antibodies bound to the plant-derived SARS-CoV viral antigens. The sample may be a biological fluid, such as blood, serum, plasma, saliva, urine, stool, sputum, nasopharyngeal aspirates, cells and tissues. Such plant-derived antigens would be cheaper alternative to those generated by infected cell lines for antibody detection.

[0011] In one embodiment, the invention relates to compositions comprising a SARS-CoV viral antigen produced by a transformed plant cell or plant. Methods of using the compositions to detect an antibody to a SARS-CoV viral antigen are also encompassed. In a specific embodiment, a method comprises contacting a sample with a composition comprising a SARS-CoV viral antigen produced by a transformed plant cell or plant, and detecting the presence of an antibody bound to the SARS-CoV viral antigen.

[0012] In one specific embodiment, the invention provides for a plastid transformation vector comprising the nucleotide sequences of the SARS-CoV virus encoding fragments, derivatives, analogs, or variants of polypeptides of SARS-CoV virus. In another embodiment, the invention provides for a plastid transformation vector which expresses SARS-CoV viral polypeptides, fragments, derivatives, analogs, or variants thereof, or molecules having the similar activities as the polypeptide of the SARS-CoV virus. In a specific embodiment, the vector devoid of viral DNA is pMLVHisA. In a specific embodiment, the present invention provides a method of producing SARS-CoV viral antigens via the plastid transformation vector pCV1, pCV6 or pCV8, and its derivatives containing an S1 with nucleotide (but not amino acid) changes to optimize codon usage for expression in plants.

[0013] In another specific embodiment, the invention provides for a nuclear transformation vector comprising the nucleotide sequences of the SARS-CoV virus, fragments, derivatives, analogs, or variants thereof. In another embodiment, the invention provides for a nuclear transformation vector which expresses SARS-CoV viral polypeptides, fragments, derivatives, analogs, or variants thereof, or molecules having the similar activities as the polypeptide of the SARS-CoV virus. In a specific embodiment, the vector devoid of viral DNA is pSa7. In a specific embodiment, the present invention provides a method of producing SARS-CoV viral antigens via the nuclear transformation vector pCV2, pCV4 or pCV12, and its derivatives containing an S1 with nucleotide (but not amino acid) changes to optimize codon usage for expression in plants.

[0014] In a specific embodiment, the present invention further provides transplastomic tobacco plants having therein a vector comprising a promoter derived from the rice plastid gene psbA, and a terminator. Plant cells containing a vector comprising a nucleotide sequence of the SARS-CoV virus is also an aspect of this invention. Plant parts of the modified plants, such as for example, fruits, leaves, tubers, seeds, flowers, stems or roots, which comprise cells expressing the SARS-CoV polypeptides, derivatives, analogs, or variants thereof are provided in the invention. The plant parts include parts that are separated from the whole plant or attached onto the whole plant. In a specific embodiment, the present invention further utilizes a selectable marker gene aadA, which specifies spectinomycin-resistance. In another embodiment, the present invention utilizes a start codon for recombinant (His)₅-tagged protein and an rbcL terminator. In a preferred embodiment, the modified plant further comprises heterologous nucleotide sequences that express protease inhibitor protein.

[0015] In another specific embodiment, the invention provides for the construction of a nuclear transformation vector for expression of SARS-CoV antigens including polypeptides of the SARS-CoV virus, or fragments, derivatives, analogs, or variants thereof, or molecules having similar activities as the polypeptides of the SARS-CoV virus. In a specific embodiment, the present invention provides plant nuclear transformation vectors pCV2, pCV4 and pCV12.

[0016] In another specific embodiment, the invention provides for the construction of a plastid transformation vector for expression of SARS-CoV antigens including polypeptides of the SARS-CoV virus, or fragments, derivatives, analogs, or variants thereof, or molecules having similar activities as the polypeptides of the SARS-CoV virus. In a specific embodiment, the present invention provides plant plastid transformation vectors pCV1, pCV6 and pCV8.

[0017] In a specific embodiment, a nuclear transformation vector is used to express one or more SARS-CoV antigens, including polypeptides of the SARS-CoV virus, or fragments, derivatives, analogs, or variants thereof, or molecules having similar activities as the polypeptides of the SARS-CoV virus.

[0018] In a specific embodiment, a plastid transformation vector is used to express one or more SARS-CoV antigens, including polypeptides of the SARS-CoV virus, or fragments, derivatives, analogs, or variants thereof, or molecules having similar activities as the polypeptides of the SARS-CoV virus.

[0019] In a specific embodiment, a plastid transformation vector and a nuclear transformation vector are used to express one or more SARS-CoV antigens, including polypeptides of the SARS-CoV virus, or fragments, derivatives, analogs, or variants thereof, or molecules having similar activities as the polypeptides of the SARS-CoV virus.

[0020] The present invention provides a method of producing SARS-CoV viral antigens in plants, the antigens include polypeptides of the SARS-CoV virus, or fragments, derivatives, analogs, or variants thereof, or molecules having similar activities as the polypeptides of the SARS-CoV virus. The method comprises transforming a plant with a vector which comprises a promoter, operably associated with a coding sequence for one or more SARS-CoV viral polypeptides, and a terminator. Plant cells containing a vector which comprises one or more nucleic acid sequences encoding for the SARS-CoV viral antigens, including polypeptides of the SARS-CoV virus, or fragments, derivatives, analogs, or variants thereof, or molecules having the similar activities as the polypeptides of the SARS-CoV virus, are also an aspect of this invention. Alternatively, the plant cells may contain one or more vectors of the present invention. The present invention provides plant parts, such as for example, fruits, leaves, tubers, seeds, flowers, stems, roots, and all other anatomical parts of the modified plant.

[0021] The present invention provides for a vaccine that elicits an immune response against SARS-CoV antigens, including SARS-CoV viral polypeptides, or fragments, derivatives, analogs, or variants thereof, or molecules having similar activities as the polypeptides of the SARS-CoV virus. In one specific embodiment, the invention provides a method of immunization against SARS. The method comprises ingesting an edible transformed plant parts comprising nucleic acid molecules of the SARS-CoV viral sequences encoding the SARS-CoV viral polypeptides. In another embodiment, the method comprises the consumption of the modified plant or intravenous injection or ingestion of an extract of the modified plant, which plant expresses SARS-CoV viral antigens, including SARS-CoV viral polypeptides, or fragments, derivatives, analogs, or variants thereof, or molecules having similar activities as the polypeptides of the SARS-CoV virus. In another specific embodiment, the present invention provides a method of immunization against SARS by feeding the modified plant of the present invention or injecting to or ingestion of an extract of the modified plant of the present invention by a rabbit, goat, cow, pig, sheep, horse, primate, civet, rodent, raccoon, raccoon dog, dog, ferret, ferret Badger, cat, avian, or any other species of animal, including human. The present invention further provides extracting antibodies from an immunized animal. The antibodies are immunospecific to SARS-CoV antigens, including viral polypeptides of the SARS-CoV virus, or fragments, derivatives, analogs, or variants thereof, or molecules having similar activities as the polypeptides of the SARS-CoV virus.

### BRIEF DESCRIPTION OF THE FIGURES

[0022] FIGS. 1A-1W show restriction sites of pCV1.

[0023] FIGS. 2A-2C show the nucleic acid sequence of pCV1 (SEQ ID NO:1).

[0024] FIGS. 3A-3B show restriction maps of pCV1 with specific restriction enzymes.

[0025] FIG. 4 shows the pMLVHisA plastid transformation vector from which pCV1, pCV6 and pCV8 were derived. The flanking regions rbcL and accD are derived from the tobacco plastid genome for homologous recombination during plastid transformation. P_{psbA} represents the promoter for the expression of the inserted gene. T_{psbA} represents the terminator. Pᵣᵣₙ represents the promoter driving expression of the spectinomycin-resistance marker aadA. T_{rbcL} represents the rbcL terminator. Met represents the start codon for recombinant (His)₅-tagged protein. (A) shows the sequence (SEQ ID NO:2) and restriction sites of pCV8. (B) shows a restriction map of pCV8 with specific restriction enzymes. (C) shows a restriction map of pCV8 with specific restriction enzymes. (D) shows a restriction map of pCV8 with specific restriction enzymes.

[0026] FIG. 5 shows the pSa7 nuclear transformation vector from which pCV2 and pCV4 were derived. RB and LB represent the right and left borders of T(transferred)-DNA for random insertion into the plant nuclear genome. NOS-Pro represents the nopaline synthase (NOS) promoter. NOS-ter represents the NOS-terminator. NPTII (Kan^{R}) represents neomycin phosphotransferase specifying kanamycin-resistance. CaMV35S-Pro represents the Cauliflower Mosaic Virus 35S promoter. SaPIN2a cDNA represents the cDNA encoding Solanum americanum proteinase inhibitor IIA.

[0027] FIGS. 6A-6I show the entire nucleic acid sequence of the SARS virus (SEQ ID NO:7).

[0028] FIGS. 7A-7LL show restriction sites of pCV8.

[0029] FIGS. 8A-8D show the nucleic acid sequence of pCV8 (SEQ ID NO:2).

[0030] FIG. 9 shows a restriction map of pCV8 with specific restriction enzymes.

[0031] FIG. 10 shows a restriction map of pCV8 with specific restriction enzymes.

[0032] FIG. 11 shows a restriction map of pCV8 with specific restriction enzymes.

[0033] FIG. 12 shows the pCV12 nuclear transformation vector for expression of a protein fusion consisting of the SARS-CoV S1 protein fused with green fluorescent protein (GFP). RB and LB represent the right and left borders of T(transferred)-DNA for random insertion into the plant nuclear genome. NOS-ter represents the NOS-terminator. CaMV35S-Pro represents the Cauliflower Mosaic Virus 35S promoter. S1 represents the SARS-CoV S1 protein and GFP, the green fluorescent protein.

[0034] FIG. 13A-13B show the genomic DNA sequence of the M-gene (SEQ ID NO: 3), and the amino acid sequence of the M protein (SEQ ID NO:4), respectively.

[0035] FIGS. 14A-14B show the genomic DNA sequence of the S-gene (SEQ ID NO:5).

[0036] FIG. 15 show the amino acid sequence of the S protein (SEQ ID NO:6).

[0037] FIGS. 16A-16NN show the deduced amino acid sequences obtained from SEQ ID NO:7 in three frames. An aster (*) indicates a stop codon which marks the end of a peptide.

[0038] FIGS. 17A-17NN show the deduced amino acid sequences obtained from the complement of SEQ ID NO:7 in three frames. An aster (*) indicates a stop codon which marks the end of a peptide.

[0039] FIGS. 18A-D show transient expression of S1:GFP in agroinfiltrated tobacco leaves. Representative tobacco leaf epidermal cells are shown by confocal microscopy 2 days following agroinfiltration (Yang Y. et al., In vivo analysis of plant promoters and transcription factors by agroinfiltration of tobacco leaves. Plant J. 2000; 22: 543-551) of Agrobacterium tumefaciens LBA4404 harboring plasmid pCV12 expressing S1:GFP fusion protein (A, C) or LBA4404 harboring pGDG expressing GFP alone (B, D). Bar represents 20 μm.

[0040] FIGS. 19A-19XX show restriction sites of pCV2.

[0041] FIGS. 20A-20E show the nucleic acid sequence of pCV2 (SEQ ID NO:8).

[0042] FIGS. 21A-21NN show restriction sites of pCV6.

[0043] FIGS. 22A-22D show the nucleic acid sequence of pCV6 (SEQ ID NO:9).

[0044] FIGS. 23A-23I show plants obtained following transformation and their analysis. FIGS. 23A-23E show the regenerated plantlets obtained following Agrobacterium-mediated transformation of tobacco and lettuce using nuclear transformation vector pCV2 and analysis of these plantlets by PCR using primers 35S and NOS-ter followed by Southern blot analysis with a ³²P-radiolabeled S1 probe. FIGS. 23F-23I show the regenerated plantlets obtained following plastid transformation of tobacco using plastid transformation vector pCV1, PCR analysis of these plantlets using S1 primers and Northern blot analysis with a ³²P-radiolabeled S1 probe. FIG. 23A shows the plants regenerated from tobacco leaves after Agrobacterium-mediated transformation. FIG. 23B shows the regenerated tobacco shoot used in the PCR analysis. FIG. 23C shows the plants regenerated from lettuce cotyledons after Agrobacterium-mediated transformation. FIG. 23D shows the regenerated lettuce shoot used in the PCR analysis. FIG. 23E shows the presence of a 2.1-kb S1 hybridizing band (arrowed) in two independent tobacco lines (lanes 2 and 3), and two independent lettuce lines (lanes 4 and 5), and the absence of this band in wild-type tobacco (lane 6) and wild-type lettuce (lane 7). One other tobacco line tested negative (lane 1). FIGS. 23F and 23G show the plantlets regenerated from tobacco after particle bombardment. FIG. 23H shows the specific 0.7-kb PCR band in regenerated tobacco (lane 2) which is absent in wild-type (lane 1). FIG. 231 shows the presence of a 2.1-kb hybridizing S1 mRNA band (arrowed) in a tobacco line (lane 2) which is absent in wild-type (lane 1).). FIG. 23J shows western blot analysis of transplastomic tobacco expressing S1 using Ni-NTA conjugate in detection of His-tagged S1 protein. The arrow indicates the expected 73-kDa (His)₅—S1 band.

[0045] FIG. 24 shows a Western blot analysis using antibodies against GFP show transient expression of S1:GFP in tobacco leaves following agroinfiltration. Total protein (200 μg) extracted from tobacco leaves, infiltrated with plasmid pGDG expressing GFP alone (lane 1) or plasmid pCV12 expressing S1:GFP fusion (lane 2), were separated on a 8% SDS-PAGE gel, blotted onto Hybond-C filters according to Sambrook et al. (1989. Molecular Cloning: A Laboratory Manual. Cold Spring Harbor Laboratory Press, Cold Spring Harbor), and cross-reacted with antibodies against GFP (Clontech). Arrow indicates cross-reacting S1:GFP band (calculated size 99.1 kDa). M, molecular mass marker.

### DETAILED DESCRIPTION OF THE INVENTION

Definitions of Terms:

[0046] As used herein, the term “modified plant or plant parts” refers to a plant or plant part, whether it is attached or detached from the whole plant. It also includes progeny of the modified plant or plant parts that are produced through sexual or asexual reproduction.

[0047] As used herein, the term “variant” refers either to a naturally occurring genetic mutant of SARS-CoV or a recombinantly prepared variation of the SARS-CoV virus, each of which contain one or more mutations in its genome compared to the SARS-CoV virus of a deposited virus, CCTCC-V200303, which sequence is shown in FIG. 6A-6I (SEQ ID NO:7). The term “variant” may also refer to either a naturally occurring variation of a given peptide or a recombinantly prepared variation of a given peptide or protein in which one or more amino acid residues have been modified by amino acid substitution, addition, or deletion. A natural variant of SARS-CoV has a sequence that is different from the genomic sequence of the SARS-CoV virus due to one or more naturally occurred mutations, including, but not limited to, point mutations, rearrangements, insertions, deletions, etc., to the genomic sequence that may or may not result in a phenotypic change. Preferably, the variants include less than 25, less than 20, less than 15, less than 10, less than 5, less than 4, less than 3, or less than 2 amino acid substitutions, rearrangements, insertions, and/or deletions relative to the SARS-CoV virus.

[0048] In preferred embodiments, the variants have conservative amino acid substitutions that are made at one or more predicted non-essential amino acid residues (i.e., amino acid residues which are not critical for the expression of the biological activities of the virus, e.g., infectivity, replication ability, protein synthesis ability, assembling ability, and cytotoxic effect). A “conservative amino acid substitution” is one in which the amino acid residue is replaced with an amino acid residue having a side chain with a similar charge. Families of amino acid residues having side chains with similar charges have been defined in the art. These families include amino acids with basic side chains (e.g., lysine, arginine, histidine), acidic side chains (e.g., aspartic acid, glutamic acid), uncharged polar side chains (e.g., glycine, asparagine, glutamine, serine, threonine, tyrosine, cysteine), nonpolar side chains (e.g., alanine, valine, leucine, isoleucine, proline, phenylalanine, methionine, tryptophan), beta-branched side chains (e.g., threonine, valine, isoleucine), and aromatic side chains (e.g., tyrosine, phenylalanine, tryptophan, histidine). In another embodiment, the variants have non-conservative amino acid substitution, i.e., amino acid residues are replaced by an amino acid that does not have a side chain with a similar charge.

[0049] In a specific embodiment, the SARS-CoV sequences that may be used in the present invention include those deposited with GenBank® having accession nos. NC_{—}004718, AY304495, AY304494, AY304493, AY304492, AY304491, AY304490, AY304489, AY304488, AY304487, AY304486, AY360146, AY278491, AY310120, AY278489, AY362699, AY362698, AY283798, AY283797, AY283796, AY283795, AY283794, AY268070, AY278741, AY340092, AY351680, AP006561, AP006560, AP006559, AP006558, AP006557, AY278554, AY348314, AY338175, AY338174, AY323977, AY322199, AY322198, AY322197, AH013000, AY322208, AY322207, AY322206, AY322205, AH012999, AY321118, AY323976, AY323975, AY323974, AY286320, AY290752, AY291315, AY307165, AY279354, AY278490, AY278487, AY297028, AY286402, AY274119, AY291451, AY271716, AY282752, AY278488, AY268049, AY269391, all of which are incorporated herein by reference in their entireties.

[0050] The SARS-CoV viral nucleotide sequences used in the present invention may be derived from a mutant SARS-CoV virus. Mutations can be introduced randomly along all or part of the coding sequence of the SARS-CoV virus or variants thereof, such as by saturation mutagenesis, and the resultant mutants can be screened for biological activity to identify mutants that retain activity. In preferred embodiments, the mutant polypeptides do not retain activity of the wild-type polypeptide. In specific embodiments, the mutant polypeptides do not retain the virulent activity of the SARS-CoV virus. Techniques for mutagenesis known in the art can also be used, including but not limited to, point-directed mutagenesis, chemical mutagenesis, in vitro site-directed mutagenesis, using, for example, the QuikChange® Site-Directed Mutagenesis Kit (Stratagene), etc. Non-limiting examples of such modifications include substitutions of amino acids to cysteines toward the formation of disulfide bonds; substitution of amino acids to tyrosine and subsequent chemical treatment of the polypeptide toward the formation of dityrosine bonds, as disclosed in detail herein; one or more amino acid substitutions and/or biological or chemical modification toward generating a binding pocket for a small molecule (substrate or inhibitor), and/or the introduction of side-chain specific tags (e.g., to characterize molecular interactions or to capture protein-protein interaction partners). Biological modifications that are useful in the present invention comprises alkylation, phosphorylation, sulfation, oxidation or reduction, ADP-ribosylation, hydroxylation, glycosylation, glucosylphosphatidylinositol addition, ubiquitination, etc. Chemical modifications that are useful in the present invention comprise, e.g., altering the charge of the recombinant virus. A positive or negative charge is chemically added to an amino acid residue where a charged amino acid residue is modified to an uncharged residue.

[0051] As used herein, the terms “antibody” and “antibodies” refer to monoclonal antibodies, bispecific antibodies, multispecific antibodies, human antibodies, humanized antibodies, chimeric antibodies, camelised antibodies, single domain antibodies, single-chain Fvs (scFv), single chain antibodies, Fab fragments, F(ab′) fragments, disulfide-linked Fvs (sdFv), and anti-idiotypic (anti-Id) antibodies (including, e.g., anti-Id antibodies to antibodies of the invention), and epitope-binding fragments of any of the above. In particular, antibodies include immunoglobulin molecules and immunologically active fragments of immunoglobulin molecules, i.e., molecules that contain an antigen binding site. Immunoglobulin molecules can be of any type (e.g., IgG, IgE, IgM, IgD, IgA and IgY), class (e.g., IgG1, IgG2, IgG3, IgG4, IgA1 and IgA2) or subclass.

[0052] As used herein, the term “an antibody that immunospecifically binds a polypeptide of the SARS-CoV virus” refers to an antibody that immunospecifically binds to the polypeptide encoded by SARS-CoV virus and does not non-specifically bind to other polypeptides. An antibody that immunospecifically binds to the polypeptide of the SARS-CoV virus does not cross-react with other antigens. Preferably, an antibody that immunospecifically binds to a polypeptide of the SARS-CoV virus does not cross-react with other antigens. An antibody that immunospecifically binds to the polypeptide of the SARS-CoV virus can be identified by, for example, immunoassays or other techniques known to those skilled in the art.

[0053] As used herein, the term “epitope” refers to a fragment of a SARS-CoV virus, polypeptide or protein having antigenic or immunogenic activity in an animal, preferably a mammal, and most preferably in a human. An epitope having immunogenic activity is a fragment of a polypeptide that elicits an antibody response in an animal. An epitope having antigenic activity is a fragment of a polypeptide or protein to which an antibody immunospecifically binds as determined by any method well known in the art, for example, by the immunoassays described herein. Antigenic epitopes need not necessarily be immunogenic.

[0054] As used herein, the term “antigenicity” refers to the ability of a substance (e.g., foreign objects, microorganisms, drugs, antigens, proteins, peptides, polypeptides, nucleic acids, DNA, RNA, etc.) to trigger an immune response in a particular organism, tissue, and/or cell. Sometimes, the term “antigenic” is synonymous with the term “immunogenic”.

[0055] As used herein, the term “immunogenicity” refers to the property of a substance (e.g., foreign objects, microorganisms, drugs, antigens, proteins, peptides, polypeptides, nucleic acids, DNA, RNA, etc.) being able to evoke an immune response within an organism. Immunogenicity depends partly upon the size of the substance in question and partly upon how unlike the host molecules is the substance. Highly conserved proteins tend to have rather low immunogenicity.

[0056] As used herein, the term “hybridizes under stringent conditions” describes conditions for hybridization and washing under which nucleotide sequences having at least 30%, at least 35%, at least 40%, at least 45%, at least 50%, at least 55%, at least 60%, at least 65%, at least 70%, at least 75%, at least 80%, at least 85%, at least 90%, or at least 95% identity to each other typically remain hybridized to each other. Such hybridization conditions are described in, for example but not limited to, Current Protocols in Molecular Biology, John Wiley & Sons, N.Y. (1989), 6.3.1-6.3.6; Basic Methods in Molecular Biology, Elsevier Science Publishing Co., Inc., N.Y. (1986), pp. 75-78, and 84-87; and Molecular Cloning, Cold Spring Harbor Laboratory, N.Y. (1982), pp. 387-389, and are well known to those skilled in the art. The conditions under which hybridization and/or washing can be carried out can range from 42-68° C. and the washing buffer can comprise from 0.1× sodium chloride/sodium citrate (SSC), 0.5% SDS to 6×SSC, 0.5% SDS. Typically, hybridization can be carried out overnight at 65° C. (high stringency conditions), 60° C. (medium stringency conditions), or 55° C. (low stringency conditions). The filters can be washed for 2×15 minutes with 0.1×SSC, 0.5% SDS at 65° C. (high stringency washing). The filters were washed for 2×15 minutes with 0.1×SSC, 0.5% SDS at 63° C. (medium stringency washing). For low stringency washing, the filters were washed at 60° C. for 2×15 minutes at 2×SSC, 0.5% SDS. A preferred, non-limiting example of stringent hybridization conditions is hybridization in 6×SSC, 0.5% SDS at about 68° C. followed by one or more washes in 2×SSC, 0.5% SDS at room temperature. Another preferred, non-limiting example of stringent hybridization conditions is hybridization in 6×SSC at about 45° C. followed by one or more washes in 0.2×SSC, 0.1% SDS at about 50-65° C.

[0057] An “isolated” or “purified” antibody is substantially free of cellular material or other contaminating proteins from the biological fluid from which the antibody is derived. The language “substantially free of cellular material” includes preparations of an antibody in which the antibody is separated from cellular components of the cells from which it is isolated. Thus, an antibody that is substantially free of cellular material includes preparations of the antibody having less than about 30%, 20%, 10%, 5%, 2.5%, or 1%, (by dry weight) of contaminating protein. In a preferred embodiment of the present invention, the antibody is isolated or purified.

[0058] As used herein, the term “having a biological activity of the polypeptides of the SARS-CoV virus” refers to the characteristics of the polypeptides or proteins having a common biological activity similar or identical structural domain and/or having sufficient amino acid identity to SARS polypeptides or the polypeptides having the amino acid sequences as shown in FIGS. 13B, 15, 16A-16NN, and 17A-17NN, or a fragment thereof. Such common biological activities of the polypeptides of the invention include antigenicity and immunogenicity.

[0059] As used herein, the term “molecules having the similar activities as the polypeptide of the SARS-CoV virus” refers to polypeptides or proteins having similar biological activities and similar or identical structural domain and/or having sufficient amino acid identity to the polypeptides of the SARS-CoV virus. Such biological activities can include, but are not limited to, antigenicity, immunogenicity, cytotoxicity, hormonal activities, binding properties and affinities, pharmacological activities, stimulation or inhibition of growth proliferation and differentiation, induction of changes in cells, antiviral, antibacterial, antifungal and antiparasitic activities, etc. In preferred embodiments, polypeptides that are useful for the present invention may retain at least one, two, three, four, five, or more biological activities of the wild-type SARS-CoV virus (e.g., infectivity, replication ability, protein synthesis ability, assembling ability, and cytotoxic effect).

[0060] As used herein, the term “portion” or “fragment” refers to a fragment of a nucleic acid molecule containing at least about 25, 30, 35, 40, 45, 100, 150, 200, 250, 300, 350, 400, 450, 500, 550, 600, 650, 700, 750, 800, 850, 900, 950, 1,000, 1,050, 1,100, 1,150, 1,200, 1,500, 2,000, 2,500, 3,000, 3,500, 4,000, 5,000, 6,000, 7,000, 8,000, 9,000, 10,000, 15,000, 20,000, 25,000, or more contiguous nucleic acids in length of the relevant nucleic acid molecule and having at least one functional feature of the nucleic acid molecule (or the encoded protein has one functional feature of the protein encoded by the nucleic acid molecule); or a fragment of a protein or a polypeptide containing at least 5, 10, 15, 20, 25, 30, 35, 40, 45, 50, 55, 60, 65, 70, 75, 80, 90, 100, 120, 140, 160, 180, 200, 220, 240, 260, 280, 300, 320, 340, 360, 380, 400, 450, 500, 600, 700, 800, 900, 1,000, 2,000, 3,000, 4,000, 5,000, 6,000, 7,000, 8,000, or more contiguous amino acid residues in length of the relevant protein or polypeptide and having at least one functional feature of the protein or polypeptide.

[0061] As used herein, the term “analog” in the context of proteinaceous agent (e.g., proteins, polypeptides, peptides, and antibodies) refers to a proteinaceous agent that possesses a similar or identical function as a second proteinaceous agent but does not necessarily comprise a similar or identical amino acid sequence of the second proteinaceous agent, or possess a similar or identical structure of the second proteinaceous agent. In a specific embodiment, antibody analogs immunospecifically bind to the same epitope as the original antibodies from which the analogs were derived. In an alternative embodiment, antibody analogs immunospecifically bind to different epitopes than the original antibodies from which the analogs were derived. A proteinaceous agent that has a similar amino acid sequence refers to a second proteinaceous agent that satisfies at least one of the following: (a) a proteinaceous agent having an amino acid sequence that is at least 30%, at least 35%, at least 40%, at least 45%, at least 50%, at least 55%, at least 60%, at least 65%, at least 70%, at least 75%, at least 80%, at least 85%, at least 90%, at least 95%, or at least 99% identical to the amino acid sequence of a second proteinaceous agent; (b) a proteinaceous agent encoded by a nucleotide sequence that hybridizes under stringent conditions to a nucleotide sequence encoding a second proteinaceous agent of at least 5 contiguous amino acid residues, at least 10 contiguous amino acid residues, at least 15 contiguous amino acid residues, at least 20 contiguous amino acid residues, at least 25 contiguous amino acid residues, at least 40 contiguous amino acid residues, at least 50 contiguous amino acid residues, at least 60 contiguous amino residues, at least 70 contiguous amino acid residues, at least 80 contiguous amino acid residues, at least 90 contiguous amino acid residues, at least 100 contiguous amino acid residues, at least 125 contiguous amino acid residues, or at least 150 contiguous amino acid residues; and (c) a proteinaceous agent encoded by a nucleotide sequence that is at least 30%, at least 35%, at least 40%, at least 45%, at least 50%, at least 55%, at least 60%, at least 65%, at least 70%, at least 75%, at least 80%, at least 85%, at least 90%, at least 95%, or at least 99% identical to the nucleotide sequence encoding a second proteinaceous agent. A proteinaceous agent with similar structure to a second proteinaceous agent refers to a proteinaceous agent that has a similar secondary, tertiary or quaternary structure to the second proteinaceous agent. The structure of a proteinaceous agent can be determined by methods known to those skilled in the art, including but not limited to, peptide sequencing, X ray crystallography, nuclear magnetic resonance, circular dichroism, and crystallographic electron microscopy.

[0062] To determine the percent identity of two amino acid sequences or of two nucleic acid sequences, the sequences are aligned for optimal comparison purposes (e.g., gaps can be introduced in the sequence of a first amino acid or nucleic acid sequence for optimal alignment with a second amino acid or nucleic acid sequence). The amino acid residues or nucleotides at corresponding amino acid positions or nucleotide positions are then compared. When a position in the first sequence is occupied by the same amino acid residue or nucleotide as the corresponding position in the second sequence, then the molecules are identical at that position. The percent identity between the two sequences is a function of the number of identical positions shared by the sequences (i.e., % identity=number of identical overlapping positions/total number of positions×100%). In one embodiment, the two sequences are the same length.

[0063] The determination of percent identity between two sequences can also be accomplished using a mathematical algorithm. A preferred, non limiting example of a mathematical algorithm utilized for the comparison of two sequences is the algorithm of Karlin and Altschul, 1990, Proc. Natl. Acad. Sci. U.S.A. Vol. 87, pages 2264-2268, modified as in Karlin and Altschul, 1993, Proc. Natl. Acad. Sci. U.S.A. Vol. 90, pages 5873-5877. Such an algorithm is incorporated into the NBLAST and XBLAST programs of Altschul et al., 1990, J. Mol. Biol. Vol. 215, page 403. BLAST nucleotide searches can be performed with the NBLAST nucleotide program parameters set, e.g., for score=100, wordlength=12 to obtain nucleotide sequences homologous to a nucleic acid molecules of the present invention. BLAST protein searches can be performed with the XBLAST program parameters set, e.g., to score 50, wordlength=3 to obtain amino acid sequences homologous to a protein molecule of the present invention. To obtain gapped alignments for comparison purposes, Gapped BLAST can be utilized as described in Altschul et al., 1997, Nucleic Acids Res. Vol. 25, pages 3389-3402. Alternatively, PSI BLAST can be used to perform an iterated search which detects distant relationships between molecules (Id.). When utilizing BLAST, Gapped BLAST, and PSI Blast programs, the default parameters of the respective programs (e.g., of XBLAST and NBLAST) can be used (see, e.g., the NCBI website). Another preferred, non limiting example of a mathematical algorithm utilized for the comparison of sequences is the algorithm of Myers and Miller, 1988, CABIOS Vol. 4, pages 11-17. Such an algorithm is incorporated in the ALIGN program (version 2.0) which is part of the GCG sequence alignment software package. When utilizing the ALIGN program for comparing amino acid sequences, a PAM120 weight residue table, a gap length penalty of 12, and a gap penalty of 4 can be used. The percent identity between two sequences can be determined using techniques similar to those described above, with or without allowing gaps. In calculating percent identity, typically only exact matches are counted.

[0064] As used herein, the term “analog” in the context of a non-proteinaceous analog refers to a second organic or inorganic molecule which possesses a similar or identical function as a first organic or inorganic molecule and is structurally similar to the first organic or inorganic molecule.

[0065] As used herein, the term “derivative” in the context of proteinaceous agent (e.g., proteins, polypeptides, peptides, and antibodies) refers to a proteinaceous agent that comprises an amino acid sequence which has been altered by the introduction of amino acid residue substitutions, deletions, and/or additions. The term “derivative” as used herein also refers to a proteinaceous agent which has been modified, i.e., by the covalent attachment of any type of molecule to the proteinaceous agent. For example, but not by way of limitation, an antibody may be modified, e.g., by glycosylation, acetylation, pegylation, phosphorylation, amidation, derivatization by known protecting/blocking groups, proteolytic cleavage, linkage to a cellular ligand or other protein, etc. A derivative of a proteinaceous agent may be produced by chemical modifications using techniques known to those of skill in the art, including, but not limited to specific chemical cleavage, acetylation, formylation, metabolic synthesis of tunicamycin, etc. Further, a derivative of a proteinaceous agent may contain one or more non-classical amino acids. A derivative of a proteinaceous agent possesses a similar or identical function as the proteinaceous agent from which it was derived.

[0066] As used herein, the term “derivative” in the context of a non-proteinaceous derivative refers to a second organic or inorganic molecule that is formed based upon the structure of a first organic or inorganic molecule. A derivative of an organic molecule includes, but is not limited to, a molecule modified, e.g., by the addition or deletion of a hydroxyl, methyl, ethyl, carboxyl or amine group. An organic molecule may also be esterified, alkylated and/or phosphorylated.

[0067] As used herein, the terms “subject” and “patient” are used interchangeably. As used herein, the terms “subject” and “subjects” refer to an animal, preferably a mammal including a non-primate (e.g., rabbits, goats, cows, pigs, sheep, horses, civets, rodents, raccoons, raccoon dogs, dogs, ferrets, ferret Badger, cats, and avian species) and a primate (e.g., monkeys such as a cynomolgous monkey and humans), and more preferably a human.

[0068] As used herein, the terms “SARS” or “SARS related symptoms” include various clinical indications and classifications. As described herein, SARS include (1) asymptomatic or mild respiratory illness; (2) moderate respiratory illness; or (3) severe respiratory illness.

[0069] As used herein, the term “carrier” is a substance used to support or convey another substance such as a pigment, catalyst, or radioactive material.

[0070] As used herein, the term “vehicle” is a substance that facilitates the use of a drug, pigment, or other material mixed with it.

[0071] As used herein, the term “excipients” refers to inert substances which are commonly used as a diluent, vehicle, preservatives, binders, or stabilizing agent for drugs and includes, but not limited to, proteins (e.g., serum albumin, etc.), amino acids (e.g., aspartic acid, glutamic acid, lysine, arginine, glycine, histidine, etc.), fatty acids and phospholipids (e.g., alkyl sulfonates, caprylate, etc.), surfactants (e.g., SDS, polysorbate, nonionic surfactant, etc.), saccharides (e.g., sucrose, maltose, trehalose, etc.) and polyols (e.g., mannitol, sorbitol, etc.). Also see Remington's Pharmaceutical Sciences (by Joseph P. Remington, 18th ed., Mack Publishing Co., Easton, Pa.), which is hereby incorporated in its entirety.

[0072] As used herein, the term “operably associated” or “operably linked” refers to an association in which the regulatory regions (e.g., promoter, enhancer) and the nucleic acid sequence to be expressed are covalently joined and positioned in such a way as to permit transcription, and under the appropriate condition, translation.

### PREFERRED EMBODIMENTS AND EXPERIMENTAL DETAILS

[0073] The present invention provides transgenic and transplastomic plants and their progeny that are generated by plastid and/or nuclear transformation vectors thereby producing a mucosal vaccine against SARS-CoV viral antigens. Viral antigens expressed in transgenic plants are effective in inducing mucosal and serum immune responses in animals, irrespective of parenteral or oral delivery. Viral antigens expressed in transgenic plants are also useful as reagents for antibody detection in serological tests. The present invention seeks to transform various types of plants with plant vectors comprising nucleotide sequences from the SARS-CoV virus including but not limited to nucleotide sequences of the SARS-CoV virus which encodes fragments, derivatives, analogs, or variants of polypeptides of SARS-CoV virus, or that it encodes an epitope or a proteinaceous molecule having similar activities as the polypeptides, fragments, derivatives, analogs, or variants thereof, of the SARS-CoV virus.

[0074] Analysis of the genome sequence of the SARS-associated coronavirus revealed that four of its eleven predicted open reading frames encode structural proteins including a spike glycoprotein (S) of 1255 deduced amino acids and a membrane glycoprotein (M) of 221 deduced amino acids; S and M presumably associate to form the viral envelope. The S glycoprotein, a type I membrane protein, functions in attachment to host receptors and has an N-terminal signal sequence (S1; amino acids 1-658) and a C-terminal transmembrane region followed by a cytoplasmic tail (Marra et al., 2003; Rota et al, 2003). The N-terminal region of M also includes an uncleavable signal sequence and is exposed to the surface of the virus while its C-terminus resides within the viral membrane. While both S and M are believed to be targeted to the plasma membrane, M was also believed to be localized at the endoplasmic reticulum in plant cells. In preferred embodiments, the modified plant or plant parts or progeny of the modified plant comprise SARS-CoV viral sequences that encode the spike protein (S or S1) of the SARS-CoV virus, or fragments, derivatives, analogs, or variants thereof. In a preferred embodiment, the modified plant or plant parts or progeny of the modified plant comprises nucleotide sequences that encode the N-terminal region (S1) of the spike protein (S) and/or the membrane protein (M) of the SARS-CoV virus, or fragments, derivatives, analogs, or variants thereof, or molecule having the similar activities as the polypeptide of the SARS-CoV virus. In preferred embodiments, the plant or plant parts comprises the nucleotide sequence of SEQ ID NO:3, 5, or 7, or a fragment thereof, or that immunospecifically binds to the polypeptide having the nucleotide sequence of SEQ ID NO:3, 5, or 7, or an analog, derivative, or fragment thereof, and/or polypeptides encoded by the nucleotide sequence of SEQ ID NO:3, 5, or 7, or a fragment thereof. The present invention also relates to a method of producing modified plants comprising one or more plastid and/or nuclear transformation vectors comprising one or more SARS-CoV nucleotide sequences which encode fragments, derivatives, analogs or variants of polypeptides of SARS-CoV virus. All varieties of plants may be used for the present invention. In a preferred embodiment, the plant is tobacco, lettuce, potato, tomato, banana, corn, rice, cereals, wheat, maize, barley, apple, pear, strawberry, carrot, sugar beets, yam, kiwifruit, or spinach.

Construction of Transformation Vectors

[0075] The present invention relates to plant vectors comprising one or more nucleotide sequences of the SARS-CoV virus, or fragments, derivatives, analogs or variants thereof. In a preferred embodiment, the plant vectors are plastid and nuclear transformation vectors. In preferred embodiments, the nucleotide sequence is the M-gene and/or S-gene of the SARS-CoV virus. The present invention also relates to the construction of plastid and nuclear transformation vectors comprising one or more SARS-CoV viral nucleotide sequences, or fragments, derivatives, analogs or artificial or natural variants thereof. In specific embodiments, the invention provides plant transformation vectors that comprise one or more nucleotide sequences that are at least 5, 10, 15, 20, 25, 30, 35, 40, 45, 100, 150, 200, 300, 350, 400, 450, 500, 550, 600, 650, 700, 750, 800, 850, 900, 950, 1,000, 1,050, 1,100, 1,150, 1,200, 2,000, 3,000, 4,000, 5,000, 6,000, 7,000, 8,000, 9,000, 10,000, 11,000, 12,000, 13,000, 14,000, 15,000, 16,000, 17,000, 18,000, 19,000, 20,000, 21,000, 22,000, 23,000, 24,000, 25,000, 26,000, 27,000, 28,000, 29,000, or more contiguous nucleotides of SEQ ID NO:7, or a complement thereof, or a nucleotide comprising a nucleotide sequence that hybridizes to the nucleotide sequences of the SARS-CoV virus under stringent conditions. In specific embodiments, the invention provides plant transformation vectors that comprise one or more nucleotide sequences that are at least 5, 10, 15, 20, 25, 30, 35, 40, 45, 100, 150, 200, 300, 350, 400, 450, 500, 550, 600, 650, or more contiguous nucleotides of SEQ ID NO:3, or a nucleotide comprising a nucleotide sequence that hybridizes to the nucleotide sequences of the SARS-CoV virus under stringent conditions. In specific embodiments, the invention provides plant transformation vectors that comprise one or more nucleotide sequences that are at least 5, 10, 15, 20, 25, 30, 35, 40, 45, 100, 150, 200, 300, 350, 400, 450, 500, 550, 600, 650, 700, 750, 800, 850, 900, 950, 1,000, 1,050, 1,100, 1,150, 1,200, 2,000, 3,000, 3,500, or more contiguous nucleotides of SEQ ID NO:5, or a nucleotide comprising a nucleotide sequence that hybridizes to the nucleotide sequences of the SARS-CoV virus under stringent conditions. In specific embodiments, the invention provides plant transformation vectors that comprise one or more nucleotide sequences that encode polypeptides that are at least 5, 10, 15, 20, 25, 30, 35, 40, 45, 100, 150, 200, or more contiguous amino acids of SEQ ID NO:4. In specific embodiments, the invention provides plant transformation vectors that comprise one or more nucleotide sequences that encode polypeptides that are at least 5, 10, 15, 20, 25, 30, 35, 40, 45, 100, 150, 200, 300, 350, 400, 450, 500, 550, 600, 650, 700, 750, 800, 850, 900, 950, 1,000, 1,050, 1,100, 1,150, 1,200, or more contiguous amino acids of SEQ ID NO:6. In one embodiment, the plant vector comprises nucleotide sequences that encode amino acids 14-1195 of S. In preferred embodiments, the plant vector comprises nucleotide sequences that encode at least 20, 30, 40, 50, 60, 80, 100, 200, 300, 400, 500, or more contiguous amino acids in length of amino acids 14-1195 of S. In specific embodiments, the polypeptides are those shown in FIGS. 16A-16NN and 17A-17NN, or fragments, derivatives or analogs thereof. In specific embodiments, the invention provides plant transformation vectors that comprise one or more nucleotide sequences that encode any of the genes, or portions thereof, or variants, fragments, analogs, or derivatives, from the SARS-CoV virus. These genes include, but are not limited to, envelop protein (E protein), integral membrane protein (M protein), spike protein (S protein), nucleocapsid protein (N protein), hemagglutinin esterase (HE protein), and RNA-dependent RNA polymerase. Particularly useful are also those proteinaceous substances that are encoded by recombinant nucleic acid fragments of the SARS-CoV genome. Preferred are those that are within the open reading frames (ORFs), in particular, for eliciting SARS-CoV specific antibody or T cell responses, whether in vivo (e.g., for protective or therapeutic purposes or for providing diagnostic antibodies) or in vitro (e.g., by phage display technology or another technique useful for generating synthetic antibodies).

[0076] The viral vectors can be engineered to provide antigenic molecules, including nucleotide sequences, or polypeptides of the SARS-CoV virus, including recombinant and chimeric forms of the virus, or subunits of the virus, or fragments, derivatives, analogs, or variants thereof, or molecules having similar activities as the polypeptides of the SARS-CoV virus. The present invention further provides methods of preparing recombinant or chimeric forms of SARS-CoV antigen.

[0077] In another specific embodiment, the present invention provides methods for treating, ameliorating, managing, or preventing SARS by administering a vaccine preparations or antibodies of SARS-CoV virus alone or in combination with antivirals (e.g., amantadine, rimantadine, zanamivir, abacavir, combivir, emtricitabine, tenofovir, trizivir, enfuvirtide, gancyclovir, acyclovir, ribavirin, penciclovir, oseltamivir, foscamet zidovudine (AZT), didanosine (ddI), lamivudine (3TC), zalcitabine (ddC), stavudine (d4T), nevirapine, delavirdine, efavirenz, fosamprenavir, amprenavir, atazanavir, kaletra, indinavir, ritonavir, vidarabine, nelfinavir, saquinavir, relenza, tamiflu, pleconaril, interferons, etc.), steroids and corticosteroids such as prednisone, cortisone, fluticasone and glucocorticoid, antibiotics, analgesics, bronchodialaters, or other treatments for respiratory and/or viral infections. In another specific embodiment, the methods of the present invention provides the use of herbs, herbal extracts, Chinese medicine and other remedies in combination with the modified plants of the present invention for the prevention and treatment of SARS.

[0078] Furthermore, the present invention provides pharmaceutical compositions comprising anti-viral agents of the present invention and a pharmaceutically acceptable carrier, vehicle or excipient. In addition, the present invention provides pharmaceutical compositions comprising liposomally encapsulated plant extracts, preferably purified, or anti-viral agents of the present invention. The present invention also provides kits comprising the pharmaceutical compositions of the present invention.

[0079] The present invention encompasses the use of a nucleotide sequence that encodes a chimeric polypeptide of the SARS-CoV virus. In a specific embodiment, the chimeric polypeptide comprises amino acid sequences from two or more different strains of the SARS-CoV virus. In accordance with the present invention, the modified plants of the present invention further comprise a nucleotide sequence that is non-native to the viral genome. The nucleotide sequence that may be useful for the present invention includes a portion of the SARS-CoV viral sequence which further comprises a heterologous nucleotide sequence. A heterologous nucleotide sequence may be from a virus, bacteria, animal, or plant. In a preferred embodiment, the heterologous nucleotide sequence encodes a proteinase inhibitor. The heterologous nucleotide sequence renders the expressed SARS-CoV polypeptide more stable and reduces programmed cell death and increases shelf life of the modified plant of the present invention. In a specific embodiment, the heterologous nucleotide sequence (e.g., SaPIN2a or SaPIN2b) renders the expressed SARS-CoV polypeptides more stable so that the modified plants that express the SARS-CoV polypeptide may be processed before ingestion, injection, or other methods of administration. SaPIN2a and SaPIN2b, which are proteinase inhibitor II genes isolated from Solanum americanum, a weed belonging to the Solanaceae family, encode serine proteinase inhibitor II proteins which confer insect resistance in transgenic plants (See U.S. Provisional Application No. 60/429,992 filed Nov. 29, 2002; and U.S. application Ser. No. 10/725,829, Attorney Docket No. 9661-043-999, filed Dec. 1, 2003, each of which is incorporated by reference herein in its entirety). SaPIN2a and SaPIN2b are highly expressed in the phloem and have possible involvement in regulating proteolysis in the sieve elements (See, Xu et al., 2001, Plant Mol. Biol. Vol. 47, pages 727-738; and Xu et al., 2003, Planta Vol. 218, pages 623-629, each of which is incorporated by reference herein in its entirety).

[0080] In certain embodiments, the present invention relates to vectors and nucleic acid molecules comprising the nucleotide sequence that encodes a chimeric polypeptide of the SARS-CoV virus. In a specific embodiment, a vector comprises a heterologous nucleotide sequence of SARS-CoV. In another embodiment, such heterologous nucleotide sequences have been added, inserted or substituted for native or non-native sequences. In accordance with the present invention, the nucleotide sequence of the SARS-CoV virus may be derived from different strains or variants of SARS-CoV virus.

[0081] A plant vector comprising chimeric SARS-CoV viral sequences may be of particular use for the generation of recombinant vaccines protecting against two or more viruses (Tao et al., J. Virol. 72: 2955-2961; Durbin et al., 2000, J. Virol. 74: 6821-6831; Skiadopoulos et al., 1998, J. Virol. 72: 1762-1768 (1998); Teng et al., 2000, J. Virol. 74: 9317-9321). For example, it can be envisaged that a plant vector comprising the SARS-CoV viral nucleotide sequences may express one or more peptides from variants of the SARS-CoV virus, and will protect a subject against infections by both the native SARS-CoV and the variant.

[0082] In accordance with the present invention, the plant vectors can be engineered to provide antigenic sequences which confer protection against infection by the SARS-CoV and natural variants thereof when ingested by a subject. The plant vectors may be engineered to provide one or more antigenic sequences of SARS-CoV virus. In accordance with the present invention, the antigenic sequences may be derived from the same virus, from different strains or variants of the same type of virus, or from different viruses.

[0083] The invention provides a host cell comprising a vector according to the invention. Plant plastid or nuclear transformation vector containing the nucleotide sequences of the SARS-CoV virus such as containing the full-length, portions or fragments of the SARS-CoV genome for the expression of SARS-CoV viral nucleic acids. These plant vectors may contain other sequences for the generation of chimeric SARS-CoV viral polypeptides which may contain mutations, deletions or insertions of the SARS-CoV polypeptides. Nucleotide sequences which encode SARS-CoV virus, fragments, derivatives, analogs, or variants of polypeptides of SARS-CoV virus include, but are not limited to, those deposited with GenBank® having accession nos. NC_{—}004718, AY304495, AY304494, AY304493, AY304492, AY304491, AY304490, AY304489, AY304488, AY304487, AY304486, AY360146, AY278491, AY310120, AY278489, AY362699, AY362698, AY283798, AY283797, AY283796, AY283795, AY283794, AY268070, AY278741, AY340092, AY351680, AP006561, AP006560, AP006559, AP006558, AP006557, AY278554, AY348314, AY338175, AY338174, AY323977, AY322199, AY322198, AY322197, AH013000, AY322208, AY322207, AY322206, AY322205, AH012999, AY321118, AY323976, AY323975, AY323974, AY286320, AY290752, AY291315, AY307165, AY279354, AY278490, AY278487, AY297028, AY286402, AY274119, AY291451, AY271716, AY282752, AY278488, AY268049, AY269391, all of which are incorporated herein by reference in their entireties.

[0084] In one specific embodiment, plant cells may be transiently or stably expressing one or more nucleotide sequences of the SARS-CoV virus. Plants cells are modified by transfection (proteins or nucleic acid vectors), infection (viral vectors) or transduction (viral vectors). The modified plant may be used to modulate a subject's immune system by stimulating a humoral immune response, a cellular immune response or by stimulating tolerance to an antigen. As used herein, a subject means: humans, primates, rabbits, goats, cows, pigs, sheep, horses, civets, rodents, raccoons, raccoon dogs, dogs, ferrets, ferret Badger, cat, cats, avian species, or other non-human animals.

[0085] The nucleotide molecules encoding the SARS-CoV viral antigen proteins may be cloned by amplification. The term “amplified” refers to the process of making multiple copies of the nucleic acid from a single polynucleotide molecule. The amplification of polynucleotides can be carried out in vitro by biochemical processes known to those of skill in the art. The amplification agent may be any compound or system that will function to accomplish the synthesis of primer extension products, including enzymes. Suitable enzymes for this purpose include, for example, E. coli DNA polymerase I, Taq polymerase, Klenow fragment of E. coli DNA polymerase I, T4 DNA polymerase, other available DNA polymerases, polymerase mutants, reverse transcriptase, ligase, and other enzymes, including heat-stable enzymes (i.e., those enzymes that perform primer extension after being subjected to temperatures sufficiently elevated to cause denaturation). Suitable enzymes will facilitate combination of the nucleotides in the proper manner to form the primer extension products that are complementary to each mutant nucleotide strand. Generally, the synthesis will be initiated at the 3′-end of each primer and proceed in the 5′-direction along the template strand, until synthesis terminates, producing molecules of different lengths. There may be amplification agents, however, that initiate synthesis at the 5′-end and proceed in the other direction, using the same process as described above. In any event, the method of the invention is not to be limited to the embodiments of amplification described herein.

[0086] One method of in vitro amplification, which can be used according to this invention, is the polymerase chain reaction (PCR) described in U.S. Pat. Nos. 4,683,202 and 4,683,195. The term “polymerase chain reaction” refers to a method for amplifying a DNA base sequence using a heat-stable DNA polymerase and two oligonucleotide primers, one complementary to the (+)-strand at one end of the sequence to be amplified and the other complementary to the (−)-strand at the other end. Because the newly synthesized DNA strands can subsequently serve as additional templates for the same primer sequences, successive rounds of primer annealing, strand elongation, and dissociation produce rapid and highly specific amplification of the desired sequence. The polymerase chain reaction is used to detect the presence of polynucleotides encoding cytokines in the sample. Many polymerase chain methods are known to those of skill in the art and may be used in the method of the invention. For example, DNA can be subjected to 30 to 35 cycles of amplification in a thermocycler as follows: 95° C. for 30 sec, 52-60° C. for 1 min, and 72° C. for 1 min, with a final extension step of 72° C. for 5 min. For another example, DNA can be subjected to 35 polymerase chain reaction cycles in a thermocycler at a denaturing temperature of 95° C. for 30 sec, followed by varying annealing temperatures ranging from 54-58° C. for 1 min, an extension step at 70° C. for 1 min and a final extension step at 70° C.

[0087] The primers for use in amplifying the nucleotide sequences that encodes the proteinaceous molecules of the SARS-CoV virus, or fragments, derivatives, analogs, or variants thereof, or molecules having the similar activities as the polypeptides of the SARS-CoV virus may be prepared using any suitable method, such as conventional phosphotriester and phosphodiester methods or automated embodiments thereof so long as the primers are capable of hybridizing to the polynucleotides of interest. One method for synthesizing oligonucleotides on a modified solid support is described in U.S. Pat. No. 4,458,066. The exact length of primer will depend on many factors, including temperature, buffer, and nucleotide composition. The primer must prime the synthesis of extension products in the presence of the inducing agent for amplification.

[0088] Primers used according to the method of the invention are complementary to each strand of nucleotide sequence to be amplified. The term “complementary” means that the primers must hybridize with their respective strands under conditions, which allow the agent for polymerization to function. In other words, the primers that are complementary to the flanking sequences hybridize with the flanking sequences and permit amplification of the nucleotide sequence. Preferably, the 3′ terminus of the primer that is extended has perfectly base paired complementarity with the complementary flanking strand. Primers and probes for the nucleotide sequence encoding the antigens, polypeptides of the SARS-CoV or fragments, derivatives, analogs, or variants thereof, or molecules having the similar activities as the polypeptides of the SARS-CoV virus can be developed using known methods combined with the present disclosure.

[0089] Those of ordinary skill in the art will know of various amplification methodologies that can also be utilized to increase the copy number of target nucleic acid. The polynucleotides that may be used for the present invention can be further evaluated, detected, cloned, sequenced, and the like, either in solution or after binding to a solid support, by any method usually applied to the detection of a specific nucleic acid sequence such as another polymerase chain reaction, oligomer restriction (Saiki et al., 1985, Bio/Technology Vol. 3, pages 1008-1012), allele-specific oligonucleotide (ASO) probe analysis (Conner et al., 1983, Proc. Natl. Acad. Sci. USA Vol. 80, page 278), oligonucleotide ligation assays (OLAs) (Landegren et al., 1988, Science Vol. 241, page 1077), RNase Protection Assay (RPA) and the like. Molecular techniques for DNA analysis have been reviewed (Landegren et al, 1988, Science Vol. 242, pages 229-237). Following DNA amplification, the reaction product may be detected by Southern blot analysis, without using radioactive probes. In such a process, for example, a small sample of DNA containing the polynucleotides obtained from the tissue or subject are amplified, and analyzed via a Southern blotting technique. The use of non-radioactive probes or labels is facilitated by the high level of the amplified signal.

[0090] The size of the primers used to amplify nucleotide sequences that encode antigens, polypeptides of the SARS-CoV or fragments, derivatives, analogs, or variants thereof, or molecules having the similar activities as the polypeptides of the SARS-CoV virus is at least 10, 15, 20, 25, 30 nucleotide in length. In particular, primers that amplify the M-gene or S-gene is most preferred. Preferably, the G:C ratio should be above 30%, 35%, 40%, 45%, 50%, 55%, 60% so as to prevent hair-pin structure on the primer. Furthermore, the amplicon should be sufficiently long enough to be detected by standard molecular biology methodologies. Preferably, the amplicon is at least 40, 60, 100, 200, 300, 400, 500, 600, 800, 1000, or more base pair in length.

[0091] The polynucleotides that may be used in the present invention include polynucleotides having the DNA sequences presented herein, and additionally include any nucleotide sequences encoding an epitope comprising contiguous and functional antigens, polypeptides of the SARS-CoV or fragments, derivatives, analogs, or variants thereof, or molecules having the similar activities as the polypeptides of the SARS-CoV virus encoding open reading frame (ORF) that hybridizes to a complement of the DNA sequences presented herein under highly stringent conditions. By way of example and not limitation, high stringency hybridization conditions can be defined as follows: The filter-bound DNA were hybridized in a solution containing 50% deionized formamide, 6×SSC, 5× Denhardt's, 1% SDS, 100 μg/ml denatured salmon sperm DNA at 42° C. overnight (about 4-16 hours), and washing in 0.1× SSC, 0.1% SDS at 65° C. (Ausubel F. M. et al., eds., 1989, Current Protocols in Molecular Biology, Vol. 1, Green Publishing Associates, Inc., and John Wiley & sons, Inc., New York) and encodes a functionally equivalent gene product. For oligonucleotide probes, by way of example and not limitation, highly stringent conditions may refer, e.g., to washing in 6×SSC/0.05% sodium pyrophosphate at 37° C. (for 14-base oligos), 48° C. (for 17-base oligos), 55° C. (for 20-base oligos), and 60° C. (for 23-base oligos).

[0092] Additionally contemplated polynucleotides that may be used in the present invention include any nucleotide sequences that hybridize under moderately stringent conditions to the complement of the DNA sequences that encode antigens, polypeptides of the SARS-CoV or fragments, derivatives, analogs, or variants thereof, or molecules having the similar activities as the polypeptides of the SARS-CoV virus. By way of example but not limitation, such moderately stringent conditions may include, e.g., washing in 0.2×SSC/0.1% SDS at 42° C. (Ausubel et al., 1989, supra).

[0093] Additionally contemplated polynucleotides that may be used in the present invention include any nucleotide sequences that hybridize under low stringency conditions to the complement of the DNA sequences that encode antigens, polypeptides of the SARS-CoV or fragments, derivatives, analogs, or variants thereof, or molecules having the similar activities as the polypeptides of the SARS-CoV virus. By way of example and not limitation, procedures using such conditions of low stringency are described in Shilo and Weinberg, 1981, Proc. Natl. Acad. Sci. USA Vol. 78, pages 6789-6792. A variant may comprise one or more changes in the amino acid sequence of the protein, e.g., by way of addition, substitution, or deletion of one or more amino acids, compared with the wild type protein. Any change should not abolish the ability of the protein to perform its function, though it may increase or decrease this ability depending on the nature of the changes. Preferably, the amino acid changes are conservative.

[0094] In various embodiments, antigen, polypeptide of the SARS-CoV virus or fragment, variant, analog, or derivative may be expressed as a fusion, or chimeric protein product (comprising the enzyme, fragment, analog, or derivative joined via a peptide bond to a heterologous protein sequence (of a different protein)). Such a chimeric gene product can be made by ligating the appropriate nucleic acid sequences encoding the desired amino acid sequences to each other by methods known in the art, in the proper coding frame, and expressing the chimeric product by methods commonly known in the art. Alternatively, such a chimeric product may be made by protein synthetic techniques, e.g., by use of a peptide synthesizer. Preferably, the fragment, analog, and derivative of the enzyme in the fusion protein retains the ability to perform the enzyme's function.

[0095] For the construction of plant nuclear transformation vectors, the expression of the SARS-CoV nucleotide sequences, genes, fragments, derivatives, analogs or variants thereof may be driven by any of a number of regulatory elements. For example, viral promoters such as the 35S RNA and 19S RNA promoters of CaMV (Brisson et al., 1984, Nature Vol. 310, pages 511-514), or the coat protein promoter of TMV (Takamatsu et al., 1987, EMBO J. Vol. 6, pages 307-311) may be used; alternatively, plant promoters such as the small subunit of RUBISCO (Coruzzi et al., 1984, EMBO J. Vol. 3, pages 1671-1680; Broglie et al., 1984, Science Vol. 224, pages 838-843); or heat shock promoters, e.g., soybean hsp17.5-E or hsp17.3-B (Gurley et al., 1986, Mol. Cell. Biol. Vol. 6, pages 559-565) may be used. These constructs can be introduced into plant cells using Ti plasmids, R1 plasmids, plant virus vectors, direct DNA transformation, biolistics/particle bombardment, microinjection, electroporation, etc. For reviews of such techniques see, for example, Weissbach & Weissbach, 1988, Methods for Plant Molecular Biology, Academic Press, New York, Section VIII, pp. 421-463; and Grierson & Corey, 1988, Plant Molecular Biology, 2d Ed., Blackie, London, Ch. 7-9. As used herein, regulatory elements include but are not limited to inducible and non-inducible promoters, enhancers, operators and other elements known to those skilled in the art that drive and regulate expression. Preferably the promoter is capable of directing expression in a particular tissue of the plant and/or at particular stages of development of the plant. The promoter may be heterologous or homologous to the plant. Preferably the promoter directs expression to the fruit, e.g., tomato, the leaves, e.g., lettuce, the endosperm of the plant seed or to the roots or tuber of the plant. A preferred promoter is the high molecular weight glutenin (HMWG) gene of wheat. Other suitable promoters will be known to the skilled man, such as the promoters of gliadin, branching enzyme, ADPG pyrophosphorylase, starch synthase and actin, for example.

[0096] A transformed plant with the ability to express SARS-CoV antigens including polypeptides of the SARS-CoV virus, or fragments, derivatives, analogs, or variants thereof, or molecules having the similar activities as the polypeptides of the SARS-CoV virus may be engineered by transforming a plant cell with a vector comprising a sequence encoding antigens, including polypeptides of the SARS-CoV or fragments, derivatives, analogs, or variants thereof, or molecules having the similar activities as the polypeptides of the SARS-CoV virus. In one embodiment, a plant promoter is operably associated with a sequence encoding the desired antigens. As used herein, the term “Operably associated” or “operably linked” refers to an association in which the regulatory regions (e.g., promoter, enhancer) and the nucleic acid sequence to be expressed are covalently joined and positioned in such a way as to permit transcription, and under the appropriate condition, translation. In a preferred embodiment of the present invention, the associated promoter for nuclear transformation is a strong and non tissue- or developmental-specific plant promoter (e.g., a promoter that strongly expresses in many or all plant tissue types). Examples of such strong, “constitutive” promoters include, but are not limited to, the CaMV 35S promoter (Odell et al., 1985, Nature 313:810-812), the T-DNA mannopine synthetase promoter, and their various derivatives. In another preferred embodiment, an inducible or repressible promoter is used to express the SARS-CoV virus of interest in a plant, for example, a tet operator promoter as described in Weinmann et al., 1994, The Plant Journal 5: 559-569; or a glucocorticoid-inducible promoter as described in McNellis et al., 1998, The Plant Journal 14: 247-257; or an ethanol inducible promoter as described in Caddick et al., 1998, Nature Biotechnology 16: 177-180. See, also, Gatz, 1995, Methods In Cell Biology 50: 411-424, which describes inducible and repressible gene expression systems for plants.

[0097] The promoters used for plastid transformation include strong and constitutive promoters in plastid expression including the psbA promoter (the psbA gene encodes the photosystem II 32 kD protein) and the 16S rRNA operon (rrn) promoter, or modifications thereof of these promoters which have enhanced expression (Suzuki et al., 2003, Plant Cell 15: 195-205; see also PCT publication no. WO 00/03012).

[0098] In one embodiment of the invention, SARS-CoV antigens will be localized in the apoplastic space from nuclear expression. The SARS-CoV antigens may be directed to the apoplastic space, when expressed in a plant, by expressing the antigens as fusion proteins together with a peptide that acts as a signal or transporter so that the antigen is localized in the apoplastic space of the transgenic plant. A variety of signal or transporter peptides can be used, for example, the PR1b signal sequence as described in Lund et al., 1992, Plant Molecular Biology 18: 47-53; or the PR-1a, b and c signal sequences as described in Pfitzner et al., 1987, Nucleic Acids Research 15: 4449-4465. A fusion protein comprising a signal or transporter peptide and an SARS-CoV antigen may be constructed by linking polynucleotides specific for each component to each other (e.g., the polynucleotides are linked in frame) so that the desired fusion protein is made when the fusion polynucleotide is expressed in a transgenic plant. A skilled artisan would know how to construct a polynucleotide useful for expressing SARS-CoV antigens, including polypeptides of the SARS-CoV or fragments, derivatives, analogs, or variants thereof, or molecules having the similar activities as the polypeptides of the SARS-CoV virus in the apoplastic space of a transgenic plant.

[0099] In another embodiment of the present invention, it may be advantageous to engineer a plant with a vector comprising a sequence SARS-CoV antigens, polypeptides of the SARS-CoV or fragments, derivatives, analogs, or variants thereof, or molecules having the similar activities as the polypeptides of the SARS-CoV virus operably associated with a tissue- or developmental-specific promoter, such as, but not limited to, the tomato E8 fruit-specific promoter, the chalcone synthase (CHS) promoter, the patatin promoter.

[0100] In yet another embodiment of the present invention, it may be advantageous to transform a plant with a vector comprising a sequence encoding SARS-CoV antigens, polypeptides of the SARS-CoV or fragments, derivatives, analogs, or variants thereof, or molecules having the similar activities as the polypeptides of the SARS-CoV virus operably linked to a modified or artificial promoter. Typically, such promoters, constructed by recombining structural elements of different promoters, have unique expression patterns and/or levels not found in natural promoters. See, e.g., Salina et al., 1992, Plant Cell 4: 1485-1493, for examples of artificial promoters constructed from combining cis-regulatory elements with a promoter core.

[0101] In yet an additional embodiment of the present invention, the expression of SARS-CoV antigens, polypeptides of the SARS-CoV or fragments, derivatives, analogs, or variants thereof, or molecules having the similar activities as the polypeptides of the SARS-CoV virus may be engineered by increasing the copy number of the gene encoding the desired protein or polypeptide using techniques known in the art.

[0102] The present invention provides a vector capable of directing the expression of SARS-CoV viral nucleotide sequences, fragments, derivatives, analogs or variants thereof, in a genetically modified plant or progeny thereof including, for example, transgenic and transplastomic plants. The plant vector is constructed using general recombinant DNA and cloning techniques known in the art of biotechnology, see, e.g., Sambrook et al., supra; Ausubel et al., supra. Such a polynucleotide construct typically comprises a polynucleotide sequence that encodes an engineered gene product and one or more regulatory polynucleotide sequence. Regulatory sequences useful for the polynucleotide construct of the invention include, but are not limited to, a promoter, an enhancer, an intron, a splice donor, a splice acceptor, a polyadenylation sequence, a RNA stability regulating sequence, or an element of any one of the above (e.g., promoter elements including, but not limited to, a TATA box). The regulatory elements useful for the present invention are capable of directing expression in a plant species in which expression of the nucleotide sequences that encode the SARS-CoV viral antigens is desired. In another preferred aspect, the regulatory elements are capable of directing expression in a cell type in which expression of the engineered gene product is desired in the plant species of interest.

[0103] Regulatory elements useful for the present invention are known to those of skill in the art, for example, promoter and enhancer elements of genes known to be expressed in the cell type and plant species of interest. A promoter useful for expression of the SARS-CoV viral antigens in a plant species of interest may also be isolated using routine experimentation, for example, by isolating a promoter region of a gene known to be expressed in the desired fashion. For example, one may screen a genomic library with a cDNA probe specific for the 5′ end of a messenger RNA known to be expressed in the cell type of interest of the plant species of interest. Such a 5′ end cDNA probe should preferably be only about 100 base pairs to about 300 base pairs so that the clones identified in the genomic library are likely to include the 5′ end of the gene possibly including the promoter region of the gene for which the probe is specific. The promoter region typically includes about 1,000 to about 2,000 base pairs upstream of the transcription initiation site. Thus, a promoter useful for the expression of the engineered SARS-CoV nucleotide sequences, genes, fragments, derivatives, analogs or variants thereof of the present invention is a polynucleotide from about 2,000 base pairs upstream to about 50 base pairs downstream of the transcription initiation site of a gene known to be expressed in the cell type of interest in the plant species of interest, or is a portion of the polynucleotide.

[0104] In order to facilitate the proper processing of the SARS-CoV viral antigens, it may be necessary to include a nucleotide sequence that encodes a peptide sequence necessary for such processing. For example, a peptide sequence which is recognized by and functional in the transgenic host plant, for example, to facilitate the entry of the antigen into the endoplasmic reticulum may be necessary, i.e., signal Sequence.

Transformation of Plants and Plant Cells

[0105] Plants and plant cells nuclei and plastids may be transformed using any method known in the art. In an embodiment of the present invention, Agrobacterium is employed to introduce the vector of the present invention in nuclear transformation. Such transformation preferably uses binary Agrobacterium T-DNA vectors (Bevan, 1984, Nuc. Acid Res. Vol. 12, pages 8711-8721) and the co-cultivation procedure (Horsch et al., 1985, Science Vol. 227, pages 1229-1231). Generally, the Agrobacterium transformation system is used to engineer dicotyledonous plants (Bevan et al., 1982, Ann. Rev. Genet Vol. 16, pages 357-384; Rogers et al., 1986, Methods Enzymol. Vol. 118, pages 627-641). The Agrobacterium transformation system may also be used to transform, as well as transfer, DNA to monocotyledonous plants and plant cells (see Hernasteen et al., 1984, EMBO J. Vol. 3: pages 3039-3041; Hooykaas-Van Slogteren et al., 1984, Nature Vol. 311, pages 763-764; Grimsley et al., 1987, Nature Vol. 325, pages 1677-179; Boulton et al., 1989, Plant Mol. Biol. Vol. 12, pages 31-40; and Gould et al., 1991, Plant Physiol. Vol. 95, pages 426-434).

[0106] In other embodiments, various alternative methods for introducing recombinant nucleic acid constructs into plants and plant cells may also be utilized. These other methods are particularly useful where the target is a monocotyledonous plant or plant cell. Alternative gene transfer and transformation methods include, but are not limited to, particle gun bombardment (biolistics), protoplast transformation through calcium-, polyethylene glycol (PEG)- or electroporation-mediated uptake of naked DNA (see Paszkowski et al., 1984, EMBO J. Vol. 3, pages 2717-2722; Potrykus et al. 1985, Molec. Gen. Genet. Vol. 199, pages 169-177; Fromm et al., 1985, Proc. Nat. Acad. Sci. USA Vol. 82, pages 5824-5828; and Shimamoto, 1989, Nature Vol. 338, pages 274-276) and electroporation of plant tissues (D'Halluin et al., 1992, Plant Cell Vol. 4, pages 1495-1505). Additional methods for plant cell transformation include microinjection, silicon carbide mediated DNA uptake (Kaeppler et al., 1990, Plant Cell Reporter Vol. 9, pages 415-418), and microprojectile bombardment (see Klein et al., 1988, Proc. Nat. Acad. Sci. USA Vol. 85, pages 4305-4309; and Gordon-Kamm et al., 1990, Plant Cell Vol. 2, pages 603-618). In any methods, selectable markers may be used, at least initially, in order to determine whether transformation has actually occurred. Useful selectable markers include enzymes which confer resistance to an antibiotic, such as gentamycin, hygromycin, kanamycin and the like. Alternatively, markers which provide a compound identifiable by a color change, such as GUS, or luminescence, such as luciferase, may be used.

[0107] The chimeric gene may also comprise a gene switch mechanism which determines under what conditions or when the coding sequence is to be expressed. The gene switch may be a chemically induced promoter or a temperature controlled promoter, for example.

[0108] In a specific embodiment, each plastid transformation construct (pCV1, pCV6 or pCV8, and its derivatives containing an S1 with nucleotide (but not amino acid) changes to optimize codon usage for expression in plants) was introduced by particle gun bombardment into tobacco (Staub and Maliga, 1994, Plant Journal Vol. 6, pages 547-553) and tomato (Ruf et al., 2001, Nature Biotech Vol. 19, pages 870-875). In a specific embodiment, production of transgenic tobacco and transgenic lettuce expressing S1 or M antigen by nuclear transformation was carried out using Agrobacterium-mediated transformation (Horsch et al., 1985, Science Vol. 227, pages 1227-1231) with plasmids pCV2 [and its derivative containing an S1 with nucleotide (but not amino acid) changes to optimize codon usage for expression in plants] and pCV4, respectively. In another specific embodiment, production of transgenic tomato expressing S1 or M antigen by nuclear transformation is carried out.

[0109] According to the present invention, a wide variety of plants and plant cell systems may be engineered for the desired physiological and agronomic characteristics described herein using the nucleic acid constructs of the present invention and the various transformation methods mentioned above. In preferred embodiments, target plants and plant cells for engineering include, but are not limited to, those monocotyledonous and dicotyledonous plants, such as crops including grain crops (e.g., wheat, maize, rice, millet, barley), tobacco, fruit crops (e.g., tomato, apple, pear, strawberry, orange), forage crops (e.g., alfalfa), root vegetable crops (e.g., carrot, potato, sugar beets, yam), leafy vegetable crops (e.g., lettuce, spinach); flowering plants (e.g., petunia, rose, chrysanthemum), conifers and pine trees (e.g., pine fir, spruce); plants used in phytoremediation (e.g., heavy metal accumulating plants); oil crops (e.g., sunflower, rape seed); and plants used for experimental purposes (e.g., Arabidopsis).

Screening of Transformed Plants and Plant Cells

[0110] According to the present invention, desired plants may be obtained by engineering one or more of the vectors expressing SARS-CoV antigens as described herein into a variety of plant cell types, including but not limited to, protoplasts, tissue culture cells, tissue and organ explants, pollens, embryos, as well as whole plants. In an embodiment of the present invention, the engineered plant material is selected or screened for transformants (those that have incorporated or integrated the introduced gene construct(s)) following the approaches and methods described below. An isolated transformant may then be regenerated into a plant and progeny thereof via sexual or asexual reproduction or growth. Alternatively, the engineered plant material may be regenerated into a plant before subjecting the derived plant to selection or screening for the marker gene traits. Procedures for regenerating plants from plant cells, tissues or organs, either before or after selecting or screening for marker gene(s), are well known to those skilled in the art.

[0111] A transformed plant cell, callus, tissue or plant may be identified and isolated by selecting or screening the engineered plant material for traits encoded by the marker genes present on the transforming DNA. For instance, selection may be performed by growing the engineered plant material on media containing inhibitory amount of the antibiotic or herbicide to which the transforming gene construct confers resistance. Further, transformed plants and plant cells may also be identified by screening for the activities of any visible marker genes (e.g., the β-glucuronidase, luciferase, B or Cl genes) that may be present on the vector of the present invention. Such selection and screening methodologies are well known to those skilled in the art.

[0112] Physical and biochemical methods may also be used to identify plant or plant cell transformants containing the gene constructs of the present invention. These methods include but are not limited to: 1) Southern analysis or PCR amplification for detecting and determining the structure of the recombinant DNA insert; 2) Northern blot, S1 RNase protection, primer-extension or reverse transcriptase-PCR amplification for detecting and examining RNA transcripts of the gene constructs; 3) enzymatic assays for detecting enzyme activity, where such gene products are encoded by the gene construct; 4) protein gel electrophoresis (PAGE), Western blot techniques, immunoprecipitation, or enzyme-linked immunoassays, where the gene construct products are proteins. Additional techniques, such as in situ hybridization, enzyme staining, and immunostaining, also may be used to detect the presence or expression of the recombinant construct in specific plant organs and tissues. The methods for doing all these assays are well known to those skilled in the art.

[0113] In a specific embodiment, the selectable marker gene aadA, which specifies spectinomycin-resistance, is driven from the rice plastid 16S rRNA operon (rrn) promoter in plastid transformation. In a specific embodiment, the selectable marker gene nptII, which specifies kanamycin-resistance, is driven by the NOS (nopaline synthase) promoter in nuclear transformation.

[0114] The present invention relates to transgenic and transplastomic plants that express one or more epitopes of the SARS-CoV virus. A transgenic or transplastomic plant expressing a SARS-CoV antigen elicits the production of antibodies against SARS-CoV by the subject after ingestion of the modified plant or plant parts by a subject; or administration of plant extract to a subject using methods known in the art.

[0115] Examples of plants are monocots, dicots, crop plants (i.e., any plant species grown for purposes of agriculture, food production for animals including humans, plants that are typically grown in groups of more than about 10 plants in order to harvest the entire plant or a part of the plant, e.g., a fruit, a flower or a crop, e.g., tobacco, grain, that the plants bear, etc.), trees (i.e., fruit trees, trees grown for wood production, trees grown for decoration, etc.), flowers of any kind (i.e., plants grown for purposes of decoration, for example, following their harvest), cactuses

[0116] Further examples of plants in which the SARS-CoV viral antigens may be expressed include Viridiplantae, Streptophyta, Embryophyta, Tracheophyta, Euphyllophytes, Spermatophyta, Magnoliophyta, Liliopsida, Commelinidae, Poales, Poaceae, Oryza, Oryza sativa, Zea, Zea mays, Hordeum, Hordeum vulgare, Triticum, Triticum aestivum, Eudicotyledons, Core eudicots, Asteridae, Euasterids, Rosidae, Eurosids II, Brassicales, Brassicaceae, Arabidopsis, Magnoliopsida, Solananae, Solanales, Solanaceae, Solanum, and Nicotiana.

[0117] Also included are, for example, crops of particular interest including Solanaceae, including processing and fresh market tomatoes, pepper and eggplant; leafy plants, including lettuce and spinach; Brassicas, including broccoli, brussels sprouts, calabrese, cale, cauliflower, red cabbage and white cabbage; cucurbits, including cucumber, melon, watermelon, zucchini and squash; large seeded plants, including peas, beans and sweetcorn; rooted plants, including carrots and onions; vegetatively propagated plants, including berries, grapes, banana, pineapple, kiwifruit, and rosaceous fruit and nut crops; and tropical crops, including mango and papaya.

[0118] Thus, the invention has use over a broad range of plants including, but not limited to, species from the genera Anacardium, Arachis, Asparagus, Atropa, Avena, Brassica, Citrus, Citrullus, Capsicum, Carthamus, Cocos, Coffea, Cucumis, Cucurbita, Daucus, Elaeis, Fragaria, Glycine, Gossypium, Helianthus, Heterocallis, Hordeum, Hyoscyamus, Lactuca, Linum, Lolium, Lupinus, Lycopersicon, Malus, Manihot, Majorana, Medicago, Nicotiana, Olea, Oryza, Panieum, Panneserum, Persea, Phaseolus, Pistachia, Pisum, Pyrus, Prunus, Raphanus, Ricinus, Secale, Senecio, Sinapis, Solanum, Sorghum, Theobromus, Trigonella, Titicum, Vicia, Vitis, Vigna, and Zea.

Vaccine Formulations and Administration

[0119] The invention also provides vaccine formulations containing extracts of the modified plants of the present invention, which are suitable for administration to elicit a protective immune (humoral and/or cell mediated) response against certain antigens, e.g., for the treatment and prevention of SARS.

[0120] Suitable preparations of such vaccines include injectables, either as liquid solutions or suspensions; solid forms suitable for solution in, or suspension in, liquid prior to injection, may also be prepared. The preparation may also be emulsified, or the proteinaceous molecules encapsulated in liposomes. The active immunogenic ingredients are often mixed with carriers, vehicles or excipients which are pharmaceutically acceptable and compatible with the active ingredient. Suitable excipients are, for example, water, saline, buffered saline, dextrose, glycerol, ethanol, sterile isotonic aqueous buffer or the like and combinations thereof. In addition, if desired, the vaccine preparation may also include minor amounts of auxiliary substances such as wetting or emulsifying agents, pH buffering agents, and/or adjuvants which enhance the effectiveness of the vaccine.

[0121] Examples of adjuvants which may be effective, include, but are not limited to: aluminum hydroxide, N-acetyl-muramyl-L-threonyl-D-isoglutamine (thr-MDP), N-acetyl-nor-muramyl-L-alanyl-D-isoglutamine, N-acetylmuramyl-L-alanyl-D-isoglutaminyl-L-alanine-2-(1′-2′-dipalmitoyl-sn-glycero-3-hydroxyphosphoryloxy)-ethylamine.

[0122] The effectiveness of an adjuvant may be determined by measuring the induction of anti-idiotype antibodies directed against the injected modified plant extract formulated with the particular adjuvant.

[0123] The composition can be a liquid solution, suspension, emulsion, tablet, pill, capsule, sustained release formulation, or powder. Oral formulation can include standard carriers such as pharmaceutical grades of mannitol, lactose, starch, magnesium stearate, sodium saccharine, cellulose, magnesium carbonate.

[0124] In another embodiment, the composition can be delivered in a vesicle, in particular a liposome (see Langer, 1990, Science 249:1527-1533; Treat et al., in Liposomes in the Therapy of Infectious Disease and Cancer, Lopez-Berestein and Fidler (eds.), Liss, New York, pp. 353-365 (1989); Lopez-Berestein, ibid., pp. 317-327; see generally ibid.).

[0125] Generally, the ingredients are supplied either separately or mixed together in unit dosage form, for example, as a dry lyophilized powder or water-free concentrate in a hermetically sealed container such as an ampoule or sachette indicating the quantity of active agent. Where the composition is administered by injection, an ampoule of sterile diluent can be provided so that the ingredients may be mixed prior to administration.

[0126] In a specific embodiment, the lyophilized modified immunoglobulin of the invention is provided in a first container; a second container comprises diluent consisting of an aqueous solution of 50% glycerin, 0.25% phenol, and an antiseptic (e.g., 0.005% brilliant green).

[0127] The invention also provides a pharmaceutical pack or kit comprising one or more containers filled with one or more of the ingredients of the vaccine formulations of the invention. Associated with such container(s) can be a notice in the form prescribed by a governmental agency regulating the manufacture, use or sale of pharmaceuticals or biological products, which notice reflects approval by the agency of manufacture, use or sale for human administration.

[0128] The compositions may, if desired, be presented in a pack or dispenser device which may contain one or more unit dosage forms containing the active ingredient. The pack may for example comprise metal or plastic foil, such as a blister pack or transdermal patch. The pack or dispenser device may be accompanied by instructions for administration. Composition comprising an extract of the invention formulated in a compatible pharmaceutical carrier may also be prepared, placed in an appropriate container, and labeled for treatment of an indicated condition.

[0129] The subject to which the vaccine is administered is preferably a mammal, most preferably a human, but can also be a non-human animal including but not limited to rabbits, goats, cows, pigs, sheep, horses, civets, rodents, raccoons, raccoon dogs, dogs, ferrets, ferret Badger, cats, and avian species.

[0130] Many methods may be used to introduce the vaccine formulations of the invention; these include but are not limited to oral, intracerebral, intradermal, intramuscular, intraperitoneal, intravenous, subcutaneous, intranasal routes, and via scarification (scratching through the top layers of skin, e.g., using a bifurcated needle) or any other standard routes of immunization. In a specific embodiment, scarification is employed.

[0131] The precise dose of the extract of the modified plant to be employed in the formulation will also depend on the route of administration, and the nature of the patient, and should be decided according to the judgment of the practitioner and each patient's circumstances according to standard clinical techniques. An effective immunizing amount is that amount sufficient to produce an immune response to the SARS-CoV viral epitope in the host (i.e., an anti-idiotype reaction) to which the vaccine preparation is administered. Effective doses may also be extrapolated from dose-response curves derived from animal model test systems.

[0132] The present invention provides methods of vaccination against SARS. The methods comprise administering whole modified plants or plant parts, extracts, to a subject for the production of antibodies against SARS-CoV viral antigens. In preferred embodiments, the vaccine is administered by ingestion of the modified plants or injection of the modified plant extracts. In certain embodiments, a first vaccine comprising a modified plant extract transformed by a vector for expression of a S antigen may be administered prior to, simultaneously with, or after administration of a second vaccine comprising a modified plant extract transformed by a vector for expression of a M antigen. The term “concurrently” is not limited to the administration of prophylactic or therapeutic composition at exactly the same time, but rather it is meant that the composition of the present invention and the other agent are administered to a mammal in a sequence and within a time interval such that the composition comprising the polynucleotides can act together with the other composition to provide an increased benefit than if they were administered otherwise. In various embodiments, the prophylactic or therapeutic compositions are administered less than 1 hour apart, at about 1 hour apart, at about 1 hour to about 2 hours apart, at about 2 hours to about 3 hours apart, at about 3 hours to about 4 hours apart, at about 4 hours to about 5 hours apart, at about 5 hours to about 6 hours apart, at about 6 hours to about 7 hours apart, at about 7 hours to about 8 hours apart, at about 8 hours to about 9 hours apart, at about 9 hours to about 10 hours apart, at about 10 hours to about 11 hours apart, at about 11 hours to about 12 hours apart, no more than 24 hours apart or no more than 48 hours apart. In preferred embodiments, two or more components are administered within the same patient visit.

[0133] In other embodiments, the prophylactic or therapeutic compositions are administered at about 30 minutes, at about 1 hour apart, at about 1 hour to about 2 hours apart, at about 2 hours to about 3 hours apart, at about 3 hours to about 4 hours apart, at about 4 hours to about 5 hours apart, at about 5 hours to about 6 hours apart, at about 6 hours to about 7 hours apart, at about 7 hours to about 8 hours apart, at about 8 hours to about 9 hours apart, at about 9 hours to about 10 hours apart, at about 10 hours to about 11 hours apart, at about 11 hours to about 12 hours apart, at about 1 to 2 days apart, at about 2 to 4 days apart, at about 4 to 6 days apart, at about 1 week part, at about 1 to 2 weeks apart, or more than 2 weeks apart. One skilled in the art would be able to determine such a time frame by determining the half life of the administered compositions.

[0134] In certain embodiments, the prophylactic or therapeutic compositions of the invention are cyclically administered to a subject. Cycling therapy involves the administration of a first composition for a period of time, followed by the administration of a second composition and/or third composition for a period of time and repeating this sequential administration. Cycling therapy can reduce the development of resistance to one or more of the therapies, avoid or reduce the side effects of one of the therapies, and/or improves the efficacy of the treatment.

[0135] In certain embodiments, prophylactic or therapeutic compositions are administered in a cycle of less than about 3 weeks, about once every two weeks, about once every 10 days or about once every week. One cycle can comprise the administration of a therapeutic or prophylactic composition by infusion over about 90 minutes every cycle, about 1 hour every cycle, about 45 minutes every cycle. Each cycle can comprise at least 1 week of rest, at least 2 weeks of rest, at least 3 weeks of rest. The number of cycles administered is from about 1 to about 12 cycles, more typically from about 2 to about 10 cycles, and more typically from about 2 to about 8 cycles.

[0136] In yet other embodiments, the therapeutic and prophylactic compositions of the invention are administered in metronomic dosing regiments, either by continuous infusion or frequent administration without extended rest periods. Such metronomic administration can involve dosing at constant intervals without rest periods. The dosing regimens encompass the chronic daily administration of relatively low doses for extended periods of time. In preferred embodiments, the use of lower doses can minimize toxic side effects and eliminate rest periods. In certain embodiments, the therapeutic and prophylactic compositions are delivered by chronic low-dose or continuous infusion ranging from about 24 hours to about 2 days, to about 1 week, to about 2 weeks, to about 3 weeks to about 1 month to about 2 months, to about 3 months, to about 4 months, to about 5 months, to about 6 months. The scheduling of such dose regimens can be optimalized by the skilled physician.

[0137] The dosage amounts and frequencies of administration provided herein are encompassed by the terms therapeutically effective and prophylactically effective. The dosage and frequency further will typically vary according to factors specific for each patient depending on the specific therapeutic or prophylactic composition administered, the severity and type of disease or disorder, the route of administration, as well as age, body weight, response, and the past medical history of the patient. Suitable regimens can be selected by one skilled in the art by considering such factors and by following, for example, dosages reported in the literature and recommended in the Physician's Desk Reference (56^{th} ed., 2002).

[0138] Various delivery systems are known and can be used to administer the therapeutic or prophylactic composition of the present invention, e.g., encapsulation in liposomes, microparticles, microcapsules, recombinant cells capable of expressing the antibody or antibody fragment, receptor-mediated endocytosis (see, e.g., Wu and Wu, J. Biol. Chem. 262:4429-4432 (1987)), construction of a nucleic acid as part of a retroviral or other vector, etc. Methods of administering a prophylactic or therapeutic composition of the invention include, but are not limited to, parenteral administration (e.g., intradermal, intramuscular, intraperitoneal, intravenous and subcutaneous), epidural, and mucosal (e.g., intranasal and oral routes). In a specific embodiment, prophylactic or therapeutic composition of the invention is administered intramuscularly, intravenously, or subcutaneously. The prophylactic or therapeutic composition may be administered by any convenient route, for example by infusion or bolus injection, by absorption through epithelial or mucocutaneous linings (e.g., oral mucosa, rectal and intestinal mucosa, etc.) and may be administered together with other biologically active agents. Administration can be systemic or local.

[0139] In a specific embodiment, it may be desirable to administer the prophylactic or therapeutic composition of the invention locally to the area in need of treatment; this may be achieved by, for example, and not by way of limitation, local infusion, by injection, or by means of an implant, said implant being of a porous, non-porous, or gelatinous material, including membranes, such as sialastic membranes, or fibers.

[0140] In yet another embodiment, the prophylactic or therapeutic composition can be delivered in a controlled release or sustained release system. In one embodiment, a pump may be used to achieve controlled or sustained release (see Langer, supra; Sefton, 1987, CRC Crit. Ref. Biomed. Eng. 14:20; Buchwald et al., 1980, Surgery 88:507; Saudek et al., 1989, N. Engl. J. Med. 321:574). In another embodiment, polymeric materials can be used to achieve controlled or sustained release of the therapeutic or prophylactic composition of the invention (see e.g., Medical Applications of Controlled Release, Langer and Wise (eds.), CRC Pres., Boca Raton, Fla. (1974); Controlled Drug Bioavailability, Drug Product Design and Performance, Smolen and Ball (eds.), Wiley, New York (1984); Ranger and Peppas, 1983, J., Macromol. Sci. Rev. Macromol. Chem. 23:61; see also Levy et al., 1985, Science 228:190; During et al., 1989, Ann. Neurol. 25:351; Howard et al., 1989, J. Neurosurg. 7 1:105); U.S. Pat. No. 5,679,377; U.S. Pat. No. 5,916,597; U.S. Pat. No. 5,912,015; U.S. Pat. No. 5,989,463; U.S. Pat. No. 5,128,326; PCT Publication No. WO 99/15154; and PCT Publication No. WO 99/20253. Examples of polymers used in sustained release formulations include, but are not limited to, poly(2-hydroxy ethyl methacrylate), poly(methyl methacrylate), poly(acrylic acid), poly(ethylene-co-vinyl acetate), poly(methacrylic acid), polyglycolides (PLG), polyanhydrides, poly(N-vinyl pyrrolidone), poly(vinyl alcohol), polyacrylamide, poly(ethylene glycol), polylactides (PLA), poly(lactide-co-glycolides) (PLGA), and polyorthoesters. In a preferred embodiment, the polymer used in a sustained release formulation is inert, free of leachable impurities, stable on storage, sterile, and biodegradable. In yet another embodiment, a controlled or sustained release system can be placed in proximity of the prophylactic or therapeutic target, thus requiring only a fraction of the systemic dose (see, e.g., Goodson, in Medical Applications of Controlled Release, supra, vol. 2, pp. 115-138 (1984)).

[0141] Controlled release systems are discussed in the review by Langer (1990, Science 249:1527-1533). Any technique known to one skilled in the art can be used to produce sustained release formulations comprising one or more therapeutic composition of the invention. See, e.g., U.S. Pat. No. 4,526,938, PCT publication WO 91/05548, PCT publication WO 96/20698, Ning et al., 1996, “Intratumoral Radioimmunotheraphy of a Human Colon Cancer Xenograft Using a Sustained-Release Gel,” Radiotherapy & Oncology 39:179-189, Song et al., 1995, “Antibody Mediated Lung Targeting of Long-Circulating Emulsions,” PDA Journal of Pharmaceutical Science & Technology 50:372-397, Cleek et al., 1997, “Biodegradable Polymeric Carriers for a bFGF Antibody for Cardiovascular Application,” Pro. Int'l. Symp. Control. Rel. Bioact. Mater. 24:853-854, and Lam et al., 1997, “Microencapsulation of Recombinant Humanized Monoclonal Antibody for Local Delivery,” Proc. Int'l. Symp. Control Rel. Bioact. Mater. 24:759-760, each of which is incorporated herein by reference in their entireties.

[0142] Antibodies may be isolated from a subject after administration of the vaccine of the present invention. Methods of production of antibodies against SARS comprise administering an effective amount of modified plant to a subject and isolating antibodies from a sample of the subject after a period of time. The sample may be a biological fluid, such as blood, serum, plasma, saliva, urine, stool, sputum, nasopharyngeal aspirates, cells and tissues.

Demonstration of Prophylactic and Therapeutic Utility

[0143] The present invention provides methods for preventing, treating, ameliorating, and/or managing SARS by administration of the modified plants of the present invention to a subject in need thereof. Modified plants that are useful for the methods of the invention can be screened or assayed in a variety of ways for efficacy in treating or preventing SARS.

[0144] First, the immunopotency of a vaccine formulation containing the modified plant or extracts of the plant of the invention can be determined by monitoring the immune response of test animals following immunization with the vaccine. Generation of a humoral response may be taken as an indication of a generalized immune response, other components of which, particularly cell-mediated immunity, may be important for protection against a disease. Test animals may include mice, rabbits, chimpanzees and eventually human subjects. A vaccine made in this invention can be made to infect chimpanzees experimentally. However, since chimpanzees are a protected species, the antibody response to a vaccine of the invention can first be studied in a number of smaller, less expensive animals, with the goal of finding one or two best candidate modified plants that produce the best combinations of SARS-CoV viral epitopes to use be used in chimpanzee efficacy studies.

[0145] The safety of the vaccine can also be determined by observing or monitoring symptoms of subjects after administration of vaccine to a test subject. In a specific embodiment, the entire genome of SARS-CoV is used in the vaccine. In preferred embodiment, the plant express less than 10%, less than 20%, less than 25%, less than 30%, less than 35%, less than 40%, less than 45%, less than 50%, less than 55%, less than 60%, less than 65%, less than 70%, less than 80%, less than 90% of the SARS-CoV polypeptides.

[0146] The immune response of the test subjects can be analyzed by various approaches such as the reactivity of the resultant immune serum to antigens, as assayed by known techniques, e.g., enzyme linked immunosorbent assay (ELISA), immunoblots, radioimmunoprecipitations, etc.; or protection from infection and/or attenuation of disease symptoms in immunized hosts.

[0147] As one example of suitable animal testing, the vaccine composition of the invention may be tested in rabbits for the ability to induce an immune response to the SARS viral antigens. For example, male specific-pathogen-free (SPF) young adult New Zealand White rabbits may be used. The test group of rabbits each receives an effective amount of the vaccine, via any route of administration, e.g., ingestion of modified plant or injection of modified plant extract. A control group of rabbits receives an injection in 1 mM Tris-HCl pH 9.0 of the vaccine containing the same kind of plant extract from an unmodified plant of the same type. Blood samples may be drawn from the rabbits every one or two weeks, and serum analyzed for antibodies specific for the viral antigen was directed using, e.g., a radioimmunoassay (Abbott Laboratories). The presence of antibodies may be assayed using an ELISA. Because rabbits may give a variable response due to their outbred nature, it may also be useful to test the vaccines in mice.

[0148] In one embodiment, the invention relates to biological material collected from subjects to which the modified plants and/or plant extracts were administered, either by injection or ingestion. The biological material can be tested for the presence of SARS-CoV polypeptides or fragments thereof. Biological materials include, but are not limited to, blood, serum, plasma, saliva, urine, stool, sputum, nasopharyngeal aspirates, cells and tissues. The biological material can be collected 1 hour, 2 hours, 6 hours, 12 hours, 24 hours, 2 days, 3 days, or 1 week after administration of the modified plant and/or plant extracts of the present invention.

[0149] In addition, a modified plant of the invention may be tested by first administering the modified plant to a test subject, either animal or human, and then isolating the anti-anti-idiotypic antibodies (i.e., the Ab3 antibodies) generated as part of the anti-idiotype response to the viral antigens. The isolated Ab3 may then be tested for the ability to bind the particular viral antigen (e.g., by any immunoassays known in the art, for example, but not limited to, radioimmunoassays, ELISA, “sandwich” immunoassay, gel diffusion precipitin reactions, immunodiffusion assays, western blots, precipitation reactions, agglutination assays, complement fixation assays, immunofluorescence assays, protein A assays, immunoelectrophoresis assays, etc.)

[0150] In one aspect where the vaccine is directed against SARS-CoV viral antigen, the efficacy of the isolated Ab3 for treating SARS is screened by culturing SARS-CoV virus infected cells from a culture or a patient, contacting the cells with the Ab3 antibody to be tested, and comparing the proliferation or survival of the contacted cells with the proliferation or survival of cells not so contacted with the Ab3 antibody, wherein a lower level of proliferation or survival of the contacted cells indicates that the Ab3 antibody (which was elicited by immunization with the SARS-CoV viral antigen) is effective to treat the SARS in the patient. Many assays standard in the art can be used to assess such survival and/or growth; for example, cell proliferation can be assayed by measuring ³H-thymidine incorporation, by direct cell count, by detecting changes in transcriptional activity of known genes such as proto-oncogenes (e.g., fos, myc) or cell cycle markers; cell viability can be assessed by trypan blue staining, differentiation can be assessed visually based on changes in morphology.

[0151] The present invention also provides antibodies against the SARS-CoV virus subsequent to the administration of the modified plant of the invention to a subject in need thereof. An antibody that immunospecifically binds an antigen of the SARS-CoV virus may also be tested directly in vivo. To monitor the effect of an antibody of the invention, the level of the antigen is measured at suitable time intervals before, during, or after administration of the vaccine. Any change or absence of change in the amount of the antigen can be identified and correlated with the effect of the treatment on the subject.

[0152] In particular, in the case of SARS, the serum levels of a SARS-CoV antigen bears a direct relationship with severity of SARS. Generally, a decrease in the level of antigen is associated with efficacious treatment. The serum levels of SARS-CoV antigens in a treated subject can be measured every 1 hour, 2 hours, 3 hours, 6 hours, 12 hours, 24 hours, 2 days, 3 days, or 1 week after administration of the modified plant and/or plant extracts of the present invention to said subject.

[0153] In a preferred aspect, the approach that can be taken is to determine the levels of antigen at different time points and to compare these values with a baseline level. The baseline level can be either the level of the marker present in normal, disease free individuals; and/or the levels present prior to treatment, or during periods of stability. These levels can then be correlated with the disease course or treatment outcome.

[0154] The levels of antigen can be determined by any method well known in the art. For example, SARS-CoV viral antigen can be quantitated by known immunodiagnostic methods such as western blotting immunoprecipitation using any antibody against SARS-CoV antigen.

[0155] The strength of the immune response in vivo to the viral antigen may be determined by any method known in the art, for example, but not limited to, delayed hypersensitivity skin tests and assays of the activity of cytolytic T-lymphocytes in vitro.

[0156] Delayed hypersensitivity skin tests are of great value in the testing of the overall immunocompetence and cellular immunity to an antigen. Proper technique of skin testing requires that the antigens be stored sterile at 4° C., protected from light and reconstituted shortly before use. A 25- or 27-gauge need ensures intradermal, rather than subcutaneous, administration of antigen. Twenty-four and 48 hours after intradermal administration of the antigen, the largest dimensions of both erythema and induration are measured with a ruler. Hypoactivity to any given antigen or group of antigens is confirmed by testing with higher concentrations of antigen or, in ambiguous circumstances, by a repeat test with an intermediate test.

[0157] To test the activity of cytolytic T-lymphocytes, T-lymphocytes isolated from the immunized subject, e.g., by the Ficoll-Hypaque centrifugation gradient technique, are re-stimulated with cells bearing the antigen against SARS was directed in 3 ml RPMI medium containing 10% fetal calf serum. In some experiments, 33% secondary mixed lymphocyte culture supernatant or IL-2 is included in the culture medium as a source of T cell growth factors. In order to measure the primary response of cytolytic T-lymphocytes after immunization, the isolated T cells are cultured with or without the cells bearing the antigen. After six days, the cultures are tested for cytotoxity in a 4 hour ⁵¹Cr-release assay. The spontaneous ⁵¹Cr-release of the targets should reach a level less than 20% if immunization was effective (Heike et al., J. Immunotherapy Vol. 15, pages 15-174).

[0158] The efficacy of the antibody can be assayed by administering the antibody to a subject (either a human subject or an animal model for the disease) and then monitoring either the levels of the SARS-CoV viral antigens or symptoms of the particular infectious disease. The levels of the SARS-CoV viral antigens may be determined by any method known in the art for assaying the levels of SARS-CoV viral antigens, e.g., the viral titer, in the case of a virus, or bacterial levels (for example, by culturing of a sample from the patient), etc. A decrease in the levels of the viral antigens or an elimination, amelioration or reduction in the number of symptoms of SARS indicates that the antibody is effective. Symptoms of SARS include, but are not limited to, temperature of greater than 100.4° F. (>38° C.) (according to the CDC), chills, headache, malaise, body aches, cough, shortness of breath, difficulty breathing, and hypoxia. Radiographic evidence of pneumonia, respiratory distress syndrome, and autopsy findings are also useful to determine whether a subject is inflicted with, recovering from, or free of SARS.

Efficacy of the Prophylactic and Therapeutic Utilities

[0159] Toxicity and efficacy of the prophylactic and/or therapeutic protocols of the instant invention can be determined by standard pharmaceutical procedures in cell cultures or experimental animals, e.g., for determining the LD₅₀ (the dose lethal to 50% of the population) and the ED₅₀ (the dose therapeutically effective in 50% of the population). The dose ratio between toxic and therapeutic effects is the therapeutic index and it can be expressed as the ratio LD₅₀/ED₅₀. Prophylactic and/or therapeutic agents that exhibit large therapeutic indices are preferred. While prophylactic and/or therapeutic agents that exhibit toxic side effects may be used, care should be taken to design a delivery system that targets such agents to the site of affected tissue in order to minimize potential damage to uninfected cells and, thereby, reduce side effects.

[0160] The data obtained from the cell culture assays and animal studies can be used in formulating a range of dosage of the prophylactic and/or therapeutic agents for use in humans. The dosage of such agents lies preferably within a range of circulating concentrations that include the ED₅₀ with little or no toxicity. The dosage may vary within this range depending upon the dosage form employed and the route of administration utilized. For any agent used in the method of the invention, the therapeutically effective dose can be estimated initially from cell culture assays. A dose may be formulated in animal models to achieve a circulating plasma concentration range that includes the IC₅₀ (i.e., the concentration of the test compound that achieves a half-maximal inhibition of symptoms) as determined in cell culture. Such information can be used to more accurately determine useful doses in humans. Levels in plasma may be measured, for example, by high performance liquid chromatography.

### EXAMPLES

[0161] The following examples illustrate the generation of transgenic or transplastomic tobacco plants that comprise the M and/or S1 proteins of the SARS-CoV virus.

Plasmid Construction

[0162] The backbone for construction of these plastid transformation vectors is derived from plasmid pVSR326 (Reddy et al., 2002, Mol Breeding 9: 259-269; PCT international application no. PCT/EP00/12446, international publication no. WO 01/42441). Plasmid pVSR326 utilizes the tobacco plastid genome sequences spanning rbcL-accD to target the reporter gene encoding β-glucuronidase (GUS) into the chloroplast genome by homologous recombination (Reddy et al., 2002). The promoter and terminator for GUS are derived from the rice plastid gene psbA; the psbA gene encoding the photosystem II 32 kD protein. The selectable marker gene aadA, which specifies spectinomycin-resistance, is driven from the rice plastid 16S rRNA operon (rrn) promoter and aadA is located adjacent to GUS (Reddy et al., 2002). In the pMLVHis vectors, other than unique restriction sites at this region, a start codon plus a (His)₅-tag is incorporated to facilitate the cloning and expression of (His)₅-tagged recombinant proteins.

Construction of pCV1, a Plastid Transformation Vector for Expression of the S1 Antigen

[0163] The 2-kb SpeI-NotI fragment encoding S1 minus its start codon and signal peptide from pCRII-S1 was cloned into the NheI and NotI sites of pMLVHisA (FIG. 4). The plasmid pCRII-S1 was derived from pCRII (Invitrogen) and contains a PCR-amplified fragment of S1. In the resultant derivative, designated pCV1 (FIG. 1), amino acids 12-658 of S1 are fused in-frame to seventeen pMLVHisA-derived residues, including the ‘ATG’ start codon and a (His)₅-tag. Plasmid pMLVHisA is designed with a (His)₅-tag enabling recognition of the recombinant protein using antisera against the (His)₅-tag in western blot analysis. Also, the (His)₅-tag enables easy purification of the recombinant protein, if and when required, using Ni-NTA Agarose (Qiagen) affinity columns. The rice plastid psbA promoter drives expression of the recombinant protein and the terminator is also psbA-derived. The presence of flanking rbcL and accD sequences from the tobacco plastid genome enables homologous recombination to occur, resulting in the incorporation of S1 (and aadA) into the plastid genome of the target plant.

[0164] Since plant chloroplast genome sequences are highly-conserved, the same construct was used for plastid transformation of tobacco and tomato, both belonging to the same family Solanaceae.

Construction of pCV2, a Nuclear Transformation Vector for Expression of the S1 Antigen

[0165] The 2-kb BamHI-XhoI fragment of S1 encoding amino acids 1-658 from pCRII-S1 was cloned into the BamHI and SalI sites of pSa7 (FIG. 5), a plant nuclear transformation vector. In this case, the signal peptide of S1 (amino acids 1-13) is retained because previous reports suggest that the presence of endoplasmic reticulum-targeting signals on plant nuclear-expressed foreign proteins results in improved protein stability (Richter et al., 2000, Nature Biotech 18: 1167-1171; Sojikul et al., 2003, Proc. Natl. Acad. Sci. 100: 2209-2214). In the resultant plasmid, pCV2 (FIG. 19), S1 is placed between the strong and constitutive Cauliflower Mosaic Virus 35S promoter and the nopaline synthase (NOS) terminator. This plasmid was introduced from Escherichia coli to Agrobacterium tumefaciens strain LBA4404 in the presence of E. coli helper strain HB101/pRK2013 by triparental mating (Horsch et al., 1985, Science 227: 1227-1231).

Construction of pCV8, a Plastid Transformation Vector for Expression of the M Antigen

[0166] The 0.7-kb NcoI-SacI fragment encoding M from plasmid pCRII-M was cloned into the NcoI and SacI sites of pMLVHisA (FIG. 4) to generate pCV7. The plasmid pCRII-M was derived from pCRII (Invitrogen) and contains a PCR-amplified fragment of M. Subsequently, plasmid pCV7 was digested with NcoI and a (His)₆-tag was introduced into this site using annealed oligomers ML527 (5′-CATGGCCGCGCGGGGTTCTCATCATCATCATCATCATGG-3′; SEQ ID NO:10) and ML528 (5′-CATGCCATGATGATGATGATGATGAGAACCCCGCGCGGC-3′; SEQ ID NO:11) to create pCV8 (FIG. 7). The resultant M expressed from pCV8 is a (His)₆-tagged protein.

Construction of pCV4, a Nuclear Transformation Vector for Expression of the M Antigen

[0167] The 0.7-kb BamHI fragment encoding M from plasmid pCRII-M was cloned into the BamHI site of plant nuclear transformation vector pSal3. Plasmid pSal3 was derived from plasmid pSa7 (FIG. 5) by removal of a 0.58-kb SalI fragment of SaPIN2a cDNA followed by religation.

Construction of pCV6, a Plastid Transformation Vector for Co-Expression of the S1 and M Antigens

[0168] A 1.2-kb partial BamHI fragment consisting of the M-gene fused to the psbA terminator and the rrn promoter, in this order, from plasmid pCV3 was cloned into the BamHI unique site of plasmid pCV1 to generate plastid transformation vector pCV6 (FIG. 21) that co-expresses the S1 and M antigens. Plasmid pCV3 was obtained by cloning a 0.7-kb EcoRV-SacI fragment encoding M from pCRII-M in the StuI-SacI sites of pMLVHisA.

Codon Usage Optimization of SARS-CoV S1 Gene by Site Directed Mutagenesis

[0169] Plasmid pCRII-S1 was used as a mutagenesis template for generating derivatives of codon usage optimization. Mutagenesis was carried out by PCR with PfuTurbo DNA polymerase using the ‘QuikChange Multi site-directed mutagenesis kit’ (Stratagene), according to the manufacturer's specifications. Table 1 shows the oligonucleotides used for site-directed mutagenesis. The amplification procedure included denaturation at 95° C. for 1 min, followed by 30 cycles of denaturation (95° C. for 1 min), annealing (55° C. for 1 min) and extension (65° C. for 12 min). The amplified product was treated with DpnI to remove template DNA and the mutated DNA was used in transformation of E. coli XL10-Gold cells. DNA sequencing analysis was performed to confirm each mutation. A total of 13 nucleotide changes (as summarized in Table 1) incorporated in an “optimized” S1 was then used for cloning in plastid and nuclear transformation vectors.

TABLE 1

Oligonucleotides used for site-directed
mutagenesis of S1 for codon optimization

| Af- | | |
|---|---|---|
| fect | | |
| ed | | |
| Res- | | |
| idue | Sequence of primer | |
| | Forward primers: | |
| R18 | 5′-GGTAGTGACCTTGAC [symbol] TGCACCACTT | SEQ ID NO:12 |
| | TTGAT-3′; | |
| T75 | 5′-GGGTTTCATACTATTAATCAT [symbol] TTTG | SEQ ID NO:13 |
| | GCAACCCTGTCATAC-3′; | |
| S113 | 5′-CCATGAACAACAAGTCACAG [symbol] GTGAT | SEQ ID NO:14 |
| | TATTATTAACAATTCTACT-3′; | |
| S169 | 5′-AGTACATATCTGATGCCTTT [symbol] CTTGA | SEQ ID NO:15 |
| | TGTTTCAGAAAAGTC-3′; | |
| L209 | 5′-CCTATAGATGTAGTTCGTGAT [symbol] CCTT | SEQ ID NO:16 |
| | CTGGTTTTAACACTTTG-3′; | |
| T247 | 5′-CAAGACATTTGGGGC [symbol] TCAGCTGCAG | SEQ ID NO:17 |
| | CCTAT-3′; | |
| A398 | 5′-GATGATGTAAGACAAATA [symbol] CCAGGAC | SEQ ID NO:18 |
| | AAACTGG-3′; | |
| P507 | 5′-TCTTTTGAACTTTTAAATGCA [symbol] GCCA | SEQ ID NO:19 |
| | CGGTTTGTGGACC-3′; | |
| T509 | 5′-CTTTTAAATGCACCTGCC [symbol] GTTTGTG | SEQ ID NO:20 |
| | GACCAAAATTATC-3′; | |
| L597 | 5′-CTTCATCTGAAGTTGCTGTT [symbol] ATCAA | SEQ ID NO:21 |
| | GATGTTAACTGCAC-3′; | |
| R620 | 5′-CAACTCACACCAGCTTGG [symbol] ATATATT | SEQ ID NO:22 |
| | CTACTGGAAACAATG-3′; | |
| | Reverse primers: | |
| R18 | 5′-ATCAAAAGTGGTGCA [symbol] GTCAAGGTCA | SEQ ID NO:23 |
| | CTACC-3′; | |
| R620 | 5′-CATTGTTTCCAGTAGAATATAT [symbol] CCA | SEQ ID NO:24 |
| | AGCTGGTGTGAGTTG-3′; | |

*nucleotides in italics are mutated. The affected codons are underlined.

Plant Transformation
Plastid Transformation of Tobacco and Tomato for Expression of the S1 and/or M Antigens

[0170] Each plastid transformation construct (pCV1, pCV6 or pCV8, and its derivatives containing an S1 with nucleotide (but not amino acid) changes to optimize codon usage for expression in plants) was introduced by particle gun bombardment into tobacco (Staub and Maliga, 1994, Plant Journal 6: 547-553) and tomato (Ruf et al., 2001, Nature Biotech 19: 870-875).

Plastid Transformation of Lycopersicon esculentum cv. UC82B

[0171] Plastid transformation was carried out following Ruf et al., 2001, by bombardment of young leaves with tungsten particles coated with the desired DNA (pCV1, pCV6 or pCV8, and its derivatives containing an S1 with nucleotide (but not amino acid) changes to optimize codon usage for expression in plants).

[0172] Aseptical seeds were germinated on Murashige and Skoog (MS) medium (Murashige and Skoog, 1962, Physiol. Plant. 15: 473-497), supplemented with agar (5 g/liter) and sucrose (30 g/liter). For bombardment, young leaves from outgrowing axillary meristem were placed abaxial side facing up on RMOP medium containing MS salts, 6-benzylaminopurine (1 mg/liter), α-naphthalene acetic acid (0.1 mg/liter), thiamine (1 mg/liter), myo-inositol (100 mgaiter), agar (5 g/liter) at pH 5.7 and sucrose (30 g/liter). Bombardment was carried out using the particle delivery system, PDS1000-He (Bio-Rad) and its accessories. Tungsten particles (M 17) were coated with desired DNA and leaves bombarded. After bombardment, leaves were cut into small pieces and placed on RMOP selection medium containing spectinomycin dihydrochloride (250 mg/liter). Greenish yellow calli were passaged for few more cycles in the selection medium to obtain homoplastomic plastid-containing calli. From this calli plant regeneration will be achieved.

Plastid Transformation of N. tabacum cv. xanthi

[0173] Plastid transformation was carried out following Svab and Maliga (Svab et al., 1993, Proc. Natl. Acad. Acad. Sci. USA 90: 913-917) by bombardment of leaves with tungsten particles coated with the desired DNA (pCV1, pCV6 or pCV8, and its derivatives containing an S1 with nucleotide (but not amino acid) changes to optimize codon usage for expression in plants).

[0174] Aseptical seeds were germinated on Murashige and Skoog (MS) medium (Murashige and Skoog, 1962, Physiol. Plant. 15: 473-497), supplemented with agar (5 g/liter) and sucrose (30 g/liter). For bombardment, leaves were placed abaxial side facing up on RMOP medium containing MS salts, 6-benzylaminopurine (1 mg/liter), α-naphthalene acetic acid (0.1 mg/liter), thiamine (1 mg/liter), myo-inositol (100 mg/liter), agar (5 g/liter) at pH 5.7 and sucrose (30 g/liter). Bombardment was carried out using the particle delivery system, PDS 1000-He (Bio-Rad) and its accessories. Tungsten particles (M 17) were coated with desired DNA and leaves bombarded. After bombardment, leaves were cut into small pieces and placed on RMOP selection medium containing spectinomycin dihydrochloride (500 mg/liter). The regenerated plantlets obtained following plastid transformation of tobacco using vector pCV1 (FIG. 23F-23G) were passaged for five more cycles in selection medium to obtain homoplastomic plastid-containing plants. Results of PCR analysis (FIG. 23H) using S1 primers ML560 (5′-CAGAGAGAGTTTCCCGGATTC-3′; SEQ ID NO:25) and ML567 (5′-CAACCTATAGATGTAGTTCG-3′; SEQ ID NO:26) and of northern blot analysis (FIG. 231) using an ³²P-radiolabeled S1 probe are shown. FIG. 23J shows western blot analysis of transplastomic tobacco expressing a modified S1 (with nucleotide changes as stipulated in Table 1) using Ni-NTA conjugate in detection of a His-tagged S1 protein. The arrow indicates the expected 73-kDa (His)₅-S1 band.

Nuclear Transformation of Tobacco and Lettuce for Expression of S1 or M Antigen

[0175] Production of transgenic tobacco and transgenic lettuce expressing S1 or M antigen by nuclear transformation was carried out using Agrobacterium-mediated transformation (Horsch et al., 1985, Science 227: 1227-1231) with plasmids pCV2 [and its derivative containing an S1 with nucleotide (but not amino acid) changes to optimize codon usage for expression in plants] and pCV4, respectively.

[0176] Following Agrobacterium-mediated transformation, shoots of tobacco (FIG. 23A) and lettuce (FIG. 23C) were rooted and the regenerated shoots (FIG. 23, B, D) were used in PCR analysis using primers 35S and NOS-ter that are located within the CaMV 35S promoter and the NOS-terminator, respectively. Southern blot analysis using a ³²P-labeled S1 probe of these PCR-amplified DNA is shown in FIG. 23E. A 2.1-kb hybridizing band confirms the presence of S1-containing transgenic lines (FIG. 23E; lanes 2-5).

Nuclear Transformation of Tobacco for Expression of S1:GFP Antigen

[0177] Production of transgenic tobacco expressing a protein fusion consisting of the SARS-CoV S1 protein fused with green fluorescent protein (GFP) was carried out using Agrobacterium-mediated transformation (Horsch et al. supra.) with plasmid pCV12.

[0178] Two days after agroinfiltration, representative tobacco leaf epidermal cells were selected and observed by confocal microscopy (Yang Y. et al., In vivo analysis of plant promoters and transcription factors by agroinfiltration of tobacco leaves. Plant J. 2000; 22: 543-551) of Agrobacterium tumefaciens LBA4404 harboring plasmid pCV12 expressing S1:GFP fusion protein (FIG. 18, A, C) or LBA4404 harboring pGDG expressing GFP alone (FIG. 18, B, D). Bar represents 20 μm.

[0179] Western blot analysis was performed using antibodies against GFP and showed transient expression of S1:GFP in the tobacco leaves following agroinfiltration. Total protein (200 μg) extracted from tobacco leaves, infiltrated with plasmid pGDG expressing GFP alone (FIG. 23, lane 1) or plasmid pCV12 expressing S1:GFP fusion (FIG. 23, lane 2), were separated on a 8% SDS-PAGE gel, blotted onto Hybond-C filters according to Sambrook et al. (1989. Molecular Cloning: A Laboratory Manual. Cold Spring Harbor Laboratory Press, Cold Spring Harbor), and cross-reacted with antibodies against GFP (Clontech). The results are shown in FIG. 24, wherein arrow indicates cross-reacting S1:GFP band (calculated size 99.1 kDa) and M is the molecular mass marker.

[0180] Those skilled in the art will recognize, or be able to ascertain using no more than routine experimentation, many equivalents to the specific embodiments of the invention described herein. Such equivalents are intended to be encompassed by the following claims.

[0181] All publications, patents and patent applications mentioned in this specification are herein incorporated by reference into the specification to the same extent as if each individual publication, patent or patent application was specifically and individually indicated to be incorporated herein by reference.

[0182] Citation or discussion of a reference herein shall not be construed as an admission that such is prior art to the present invention.

The application's sequence listing, which the Patent Office published only in electronic form, follows.

SEQUENCE LISTING (4043 sequences)

SEQ ID NO: 1 - DNA, 9348 bp, Artificial Sequence
  pCV1
  CDS (1)..(9348)
tcgcgcgtttcggtgatgacggtgaaaacctctgacacatgcagctcccggagacggtcacagcttgtctgtaagcggatgccgggagcagacaagcccgtcagggcgcgtcagcgggtgttggcgggtgtcggggctggcttaactatgcggcatcagagcagattgtactgagagtgcaccatatgcggtgtgaaataccgcacagatgcgtaaggagaaaataccgcatcaggcgccattcgccattcaggctgcgcaactgttgggaagggcgatcggtgcgggcctcttcgctattacgccagctggcgaaagggggatgtgctgcaaggcgattaagttgggtaacgccagggttttcccagtcacgacgttgtaaaacgacggccagtgccaagcttgaaagagataaattgaacaagtatggtcgtcccctgttgggatgtactattaaacctaaattggggttatctgctaaaaactacggtagagccgtttatgaatgtcttcgcggtggacttgattttactaaagatgatgagaacgtgaactcacaaccatttatgcgttggagagatcgtttcttattttgtgccgaagcactttataaagcacaggctgaaacaggtgaaatcaaagggcattacttgaatgctactgcaggtacatgcgaagaaatgatcaaaagagctgtatttgctagagaattgggcgttccgatcgtaatgcatgactacttaacggggggattcaccgcaaatactagcttggctcattattgccgagataatggtctacttcttcacatccaccgtgcaatgcatgcggttattgatagacagaagaatcatggtatccacttccgggtattagcaaaagcgttacgtatgtctggtggagatcatattcactctggtaccgtagtaggtaaacttgaaggtgaaagagacataactttgggctttgttgatttactgcgtgatgattttgttgaacaagatcgaagtcgcggtatttatttcactcaagattgggtctctttaccaggtgttctacccgtggcttcaggaggtattcacgtttggcatatgcctgctctgaccgagatctttggggatgattccgtactacagttcggtggaggaactttaggacatccttggggtaatgcgccaggtgccgtagctaatcgagtagctctagaagcatgtgtaaaagctcgtaatgaaggacgtgatcttgctcaggaaggtaatgaaattattcgcgaggcttgcaaatggagcccggaactagctgctgcttgtgaagtatggaaagagatcgtatttaattttgcagcagtggacgttttggataagtaaaaacagtagacattagcagataaattagcaggaaataaagaaggataaggagaaagaactcaagtaattatccttcgttctcttaattgaattgcaattaaactcggcccaatcttttactaaaaggattgagccgaatacaacaaagattctattgcatatattttgactaagtatatacttacctagatatacaagatttgaaatacaaaatctagaaaactaaatcaaaatctaagactcaaatctttctattgttgtcttggatcatcgagcttgcatgcctgcagtcgactttcacagtttccattctgaaatgttctctgtactataataaatagtaagtgaatcaacttactactaaaaaaattagtagacttcctcttcggaatagaaatagcctatttctacatagggaaagtcgtgtgcaatgaaaaatgcaagcacgatttggggagaggttttttctctattgtaacaaggaataattatctactccatccgactagttccgggttcgagtcccgggcaacccatatggaaactagaaaggagcaatctgagttttgatttttcactcacttcatttacaaaattttttggtttggtaaattttgttgtatggatatacaactgtcggggctggcttggttgacattggtatatagtctatattatactgttaaataacaagccttctattatctttctagttaatacgtgtgcttgggagtccttgcaatttgaataaaccaagatcttaccatggccgcgcggggttctcatcatcatcatcatggtccgcgggggcccgctagtggtagtgaccttgaccggtgcaccacttttgatgatgttcaagctcctaattacactcaacatacttcatctatgaggggggtttactatcctgatgaaatttttagatcagacactctttatttaactcaggatttatttcttccattttattctaatgttacagggtttcatactattaatcatacgtttggcaaccctgtcataccttttaaggatggtatttattttgctgccacagagaaatcaaatgttgtccgtggttgggtttttggttctaccatgaacaacaagtcacagtcggtgattattattaacaattctactaatgttgttatacgagcatgtaactttgaattgtgtgacaaccctttctttgctgtttctaaacccatgggtacacagacacatactatgatattcgataatgcatttaattgcactttcgagtacatatctgatgccttttcgcttgatgtttcagaaaagtcaggtaattttaaacacttacgagagtttgtgtttaaaaataaagatgggtttctctatgtttataagggctatcaacctatagatgtagttcgtgatctaccttctggttttaacactttgaaacctatttttaagttgcctcttggtattaacattacaaattttagagccattcttacagccttttcacctgctcaagacatttggggcacgtcagctgcagcctattttgttggctatttaaagccaactacatttatgctcaagtatgatgaaaatggtacaatcacagatgctgttgattgttctcaaaatccacttgctgaactcaaatgctctgttaagagctttgagattgacaaaggaatttaccagacctctaatttcagggttgttccctcaggagatgttgtgagattccctaatattacaaacttgtgtccttttggagaggtttttaatgctactaaattcccttctgtctatgcatgggagagaaaaaaaatttctaattgtgttgctgattactctgtgctctacaactcaacatttttttcaacctttaagtgctatggcgtttctgccactaagttgaatgatctttgcttctccaatgtctatgcagattcttttgtagtcaagggagatgatgtaagacaaatagcgccaggacaaactggtgttattgctgattataattataaattgccagatgatttcatgggttgtgtccttgcttggaatactaggaacattgatgctacttcaactggtaattataattataaatataggtatcttagacatggcaagcttaggccctttgagagagacatatctaatgtgcctttctcccctgatggcaaaccttgcaccccacctgctcttaattgttattggccattaaatgattatggtttttacaccactactggcattggctaccaaccttacagagttgtagtactttcttttgaacttttaaatgcaccggccacggtttgtggaccaaaattatccactgaccttattaagaaccagtgtgtcaattttaattttaatggactcactggtactggtgtgttaactccttcttcaaagagatttcaaccatttcaacaatttggccgtgatgtttctgatttcactgattccgttcgagatcctaaaacatctgaaatattagacatttcaccttgctcttttgggggtgtaagtgtaattacacctggaacaaatgcttcatctgaagttgctgttctatatcaagatgttaactgcactgatgtttctacagcaattcatgcagatcaactcacaccagcttggcgcatatattctactggaaacaatgtattccagactcaagcaggctgtcttataggagctgagcatgtcgacacttcttatgagtgcgacattcctattggagctggcatttgtgctattaccatacagttagactagaaaagggcgaattctgcagatatccatcacactggcggccgcatcgatgagctctaattaattaaggcttttctgctaacatatagcaatttttgaagaaaggaaagctagaaatacccaatatcttgctgaagcaagatattgggtatttcttttttttttattttgaatctttctattctgaattcagttaacgacgagatttagtatcctttcttgcactttcataactcgtgaaatgccgagttggtacgaattcccccaatttgcgacctaccataggatttgttatgtaaataggtatatgttcctttccattatgaatcgcgattgtatggccaaccattgcgggtagaatgctagatgcccgggaccacgttactattgtttctttctcctccttcatattgagcttttctatttttgccaataaatgatggtacctccccccgccacgatcgaacgggaatggataagaggcttgtgggattgacgtgatagggtagggttggctatactgctggtggcgaactccaggctaataatctgaagcgcttggaagttgtagggaggatcctatggctcgtgaagcggttatcgccgaagtatcgactcaactatcagaggtagttggcgtcatcgagcgccatctcgaaccgacgttgctggccgtacatttgtacggctccgcagtggatggcggcctgaagccacacagtgatattgatttgctggttacggtgaccgtaaggcttgatgaaacaacgcggcgagctttgatcaacgaccttttggaaacttcggcttcccctggagagagcgagattctccgcgctgtagaagtcaccattgttgtgcacgacgacatcattccgtggcgttatccagctaagcgcgaactgcaatttggagaatggcagcgcaatgacattcttgcaggtatcttcgagccagccacgatcgacattgatctggctatcttgctgacaaaagcaagagaacatagcgttgccttggtaggtccagcggcggaggaactctttgatccggttcctgaacaggatctatttgaggcgctaaatgaaaccttaacgctatggaactcgccgcccgactgggctggcgatgagcgaaatgtagtgcttacgttgtcccgcatttggtacagcgcagtaaccggcaaaatcgcgccgaaggatgtcgctgccgactgggcaatggagcgcctgccggcccagtatcagcccgtcatacttgaagctagacaggcttatcttggacaagaagaagatcgcttggcctcgcgcgcagatcagttggaagaatttgtccactacgtgaaaggcgagatcactaaggtagttggcaaataactcgagactaagtggataaaattagatagaaaaaaggtctaaataaaaaagaagagaaatagaaagatcaaaaatcagttacgaaaatgcagtaattcttcttttttcttctaattgattgcaattaaactcgtctcaatctgaaaaaagattgagccgagtttaaatagattttgatacgatcatgagacttgacaaatcgggattcctctattctatatatttagaagatataaaggtataatacaataaataaatacaatctagaagctcgatgatccttaggattggtatattcttttctatcctgtagtttgtagtttccctgaatcaagccaagtatcacacctctttctacccatcctgtatattgtcccctttgttccgtgttgaaatagaaccttaatttattacttatttttttattaaattttagatttgttagtgattagatattagtattagacgagattttacgaaacaattatttttttatttctttataggagaggacaaatctcttttttcgatgcgaatttgacacgacataggagaagccgccctttattaaaaattatattattttaaataatataaagggggttccaacatattaatatatagtgaagtgttcccccagattcagaactttttttcaatactcacaatccttattagttaataatcctagtgattggatttctatgcttagtctgataggaaataagatattcaaataaataattttatagcgaatgactattcatctattgtattttcatgcaaatagggggcaagaaaactctatggaaagatggtggtttaattcgatgttgtttaagaaggagttcgaacgcaggtgtgggctaaataaatcaatgggcagtcttggtcctattgaaaataccaatgaagatccaaatcgaaaagtgaaaaacattcatagttggaggaatcgtgacaattctagttgcagtaatgttgattatttattcggcgttaaagacattcggaatttcatctctgatgacacttttttagttagtgataggaatggagacagttattccatctattttgatattgaaaatcatatttttgagattgacaacgatcattcttttctgagtgaactagaaagttctttttatagttatcgaaactcgaattatcggaataatggatttaggggcgaagatccctactataattcttacatgtatgatactcaatatagttggaataatcacattaatagttgcattgatagttatcttcagtctcaaatctgtatagatacttccattataagtggtagtgagaattacggtgacagttacatttatagggccgtttgtggtggtgaaagtcgaaatagtagtgaaaacgagggttccagtagacgaactcgcacgaagggcagtgatttaactataagagaaagttctaatgatctcgaggtaactcaaaaatacaggcatttgtgggttcaatgcgaaaattgttatggattaaattataagaaatttttgaaatcaaaaatgaatatttgtgaacaatgtggatatcatttgaaaatgagtagttcagatagaattcgtaatcatggtcatagctgtttcctgtgtgaaattgttatccgctcacaattccacacaacatacgagccggaagcataaagtgtaaagcctggggtgcctaatgagtgagctaactcacattaattgcgttgcgctcactgcccgctttccagtcgggaaacctgtcgtgccagctgcattaatgaatcggccaacgcgcggggagaggcggtttgcgtattgggcgctcttccgcttcctcgctcactgactcgctgcgctcggtcgttcggctgcggcgagcggtatcagctcactcaaaggcggtaatacggttatccacagaatcaggggataacgcaggaaagaacatgtgagcaaaaggccagcaaaaggccaggaaccgtaaaaaggccgcgttgctggcgtttttccataggctccgcccccctgacgagcatcacaaaaatcgacgctcaagtcagaggtggcgaaacccgacaggactataaagataccaggcgtttccccctggaagctccctcgtgcgctctcctgttccgaccctgccgcttaccggatacctgtccgcctttctcccttcgggaagcgtggcgctttctcatagctcacgctgtaggtatctcagttcggtgtaggtcgttcgctccaagctgggctgtgtgcacgaaccccccgttcagcccgaccgctgcgccttatccggtaactatcgtcttgagtccaacccggtaagacacgacttatcgccactggcagcagccactggtaacaggattagcagagcgaggtatgtaggcggtgctacagagttcttgaagtggtggcctaactacggctacactagaaggacagtatttggtatctgcgctctgctgaagccagttaccttcggaaaaagagttggtagctcttgatccggcaaacaaaccaccgctggtagcggtggtttttttgtttgcaagcagcagattacgcgcagaaaaaaaggatctcaagaagatcctttgatcttttctacggggtctgacgctcagtggaacgaaaactcacgttaagggattttggtcatgagattatcaaaaaggatcttcacctagatccttttaaattaaaaatgaagttttaaatcaatctaaagtatatatgagtaaacttggtctgacagttaccaatgcttaatcagtgaggcacctatctcagcgatctgtctatttcgttcatccatagttgcctgactccccgtcgtgtagataactacgatacgggagggcttaccatctggccccagtgctgcaatgataccgcgagacccacgctcaccggctccagatttatcagcaataaaccagccagccggaagggccgagcgcagaagtggtcctgcaactttatccgcctccatccagtctattaattgttgccgggaagctagagtaagtagttcgccagttaatagtttgcgcaacgttgttgccattgctacaggcatcgtggtgtcacgctcgtcgtttggtatggcttcattcagctccggttcccaacgatcaaggcgagttacatgatcccccatgttgtgcaaaaaagcggttagctccttcggtcctccgatcgttgtcagaagtaagttggccgcagtgttatcactcatggttatggcagcactgcataattctcttactgtcatgccatccgtaagatgcttttctgtgactggtgagtactcaaccaagtcattctgagaatagtgtatgcggcgaccgagttgctcttgcccggcgtcaatacgggataataccgcgccacatagcagaactttaaaagtgctcatcattggaaaacgttcttcggggcgaaaactctcaaggatcttaccgctgttgagatccagttcgatgtaacccactcgtgcacccaactgatcttcagcatcttttactttcaccagcgtttctgggtgagcaaaaacaggaaggcaaaatgccgcaaaaaagggaataagggcgacacggaaatgttgaatactcatactcttcctttttcaatattattgaagcatttatcagggttattgtctcatgagcggatacatatttgaatgtatttagaaaaataaacaaataggggttccgcgcacatttccccgaaaagtgccacctgacgtctaagaaaccattattatcatgacattaacctataaaaataggcgtatcacgaggccctttcgtc

SEQ ID NO: 2 - protein, 57 aa, Artificial Sequence
  pCV1
SRVSVMTVKTSDTCSSRRRSQLVCKRMPGADKPVRARQRVLAGVGAGLTMRHQSRLY

SEQ ID NO: 3 - protein, 13 aa, Artificial Sequence
  pCV1
ECTICGVKYRTDA

SEQ ID NO: 4 - protein, 41 aa, Artificial Sequence
  pCV1
GENTASGAIRHSGCATVGKGDRCGPLRYYASWRKGDVLQGD

SEQ ID NO: 5 - protein, 22 aa, Artificial Sequence
  pCV1
RQGFPSHDVVKRRPVPSLKEIN

SEQ ID NO: 6 - protein, 43 aa, Artificial Sequence
  pCV1
TSMVVPCWDVLLNLNWGYLLKTTVEPFMNVFAVDLILLKMMRT

SEQ ID NO: 7 - protein, 33 aa, Artificial Sequence
  pCV1
THNHLCVGEIVSYFVPKHFIKHRLKQVKSKGIT

SEQ ID NO: 8 - protein, 9 aa, Artificial Sequence
  pCV1
MLLQVHAKK

SEQ ID NO: 9 - protein, 14 aa, Artificial Sequence
  pCV1
SKELYLLENWAFRS

SEQ ID NO: 10 - protein, 4 aa, Artificial Sequence
  pCV1
CMTT

SEQ ID NO: 11 - protein, 43 aa, Artificial Sequence
  pCV1
RGDSPQILAWLIIAEIMVYFFTSTVQCMRLLIDRRIMVSTSGY

SEQ ID NO: 12 - protein, 16 aa, Artificial Sequence
  pCV1
QKRYVCLVEIIFTLVP

SEQ ID NO: 13 - protein, 8 aa, Artificial Sequence
  pCV1
VNLKVKET

SEQ ID NO: 14 - protein, 48 aa, Artificial Sequence
  pCV1
LWALLIYCVMILLNKIEVAVFISLKIGSLYQVFYPWLQEVFTFGICLL

SEQ ID NO: 15 - protein, 16 aa, Artificial Sequence
  pCV1
PRSLGMIPYYSSVEEL

SEQ ID NO: 16 - protein, 10 aa, Artificial Sequence
  pCV1
DILGVMRQVP

SEQ ID NO: 17 - protein, 26 aa, Artificial Sequence
  pCV1
KLVMKDVILLRKVMKLFARLANGARN

SEQ ID NO: 18 - protein, 27 aa, Artificial Sequence
  pCV1
LLLVKYGKRSYLILQQWTFWISKNSRH

SEQ ID NO: 19 - protein, 12 aa, Artificial Sequence
  pCV1
QEIKKDKEKELK

SEQ ID NO: 20 - protein, 33 aa, Artificial Sequence
  pCV1
LSFVLLIELQLNSAQSFTKRIEPNTTKILLHIF

SEQ ID NO: 21 - protein, 18 aa, Artificial Sequence
  pCV1
LSIYLPRYTRFEIQNLEN

SEQ ID NO: 22 - protein, 31 aa, Artificial Sequence
  pCV1
DSNLSIVVLDHRACMPAVDFHSFHSEMFSVL

SEQ ID NO: 23 - protein, 8 aa, Artificial Sequence
  pCV1
IVSESTYY

SEQ ID NO: 24 - protein, 5 aa, Artificial Sequence
  pCV1
TSSSE

SEQ ID NO: 25 - protein, 4 aa, Artificial Sequence
  pCV1
PIST

SEQ ID NO: 26 - protein, 20 aa, Artificial Sequence
  pCV1
GKSCAMKNASTIWGEVFSLL

SEQ ID NO: 27 - protein, 58 aa, Artificial Sequence
  pCV1
QGIIIYSIRLVPGSSPGQPIWKLERSNLSFDFSLTSFTKFFGLVNFVVWIYNCRGWLG

SEQ ID NO: 28 - protein, 31 aa, Artificial Sequence
  pCV1
HWYIVYIILLNNKPSIIFLVNTCAWESLQFE

SEQ ID NO: 29 - protein, 47 aa, Artificial Sequence
  pCV1
TKILPWPRGVLIIIIMVRGGPLVVVTLTGAPLLMMFKLLITLNILHL

SEQ ID NO: 30 - protein, 16 aa, Artificial Sequence
  pCV1
GGFTILMKFLDQTLFI

SEQ ID NO: 31 - protein, 52 aa, Artificial Sequence
  pCV1
LRIYFFHFILMLQGFILLIIRLATLSYLLRMVFILLPQRNQMLSVVGFLVLP

SEQ ID NO: 32 - protein, 6 aa, Artificial Sequence
  pCV1
TTSHSR

SEQ ID NO: 33 - protein, 36 aa, Artificial Sequence
  pCV1
LLLTILLMLLYEHVTLNCVTTLSLLFLNPWVHRHIL

SEQ ID NO: 34 - protein, 51 aa, Artificial Sequence
  pCV1
YSIMHLIALSSTYLMPFRLMFQKSQVILNTYESLCLKIKMGFSMFIRAINL

SEQ ID NO: 35 - protein, 10 aa, Artificial Sequence
  pCV1
FVIYLLVLTL

SEQ ID NO: 36 - protein, 40 aa, Artificial Sequence
  pCV1
NLFLSCLLVLTLQILEPFLQPFHLLKTFGARQLQPILLAI

SEQ ID NO: 37 - protein, 56 aa, Artificial Sequence
  pCV1
SQLHLCSSMMKMVQSQMLLIVLKIHLLNSNALLRALRLTKEFTRPLISGLFPQEML

SEQ ID NO: 38 - protein, 59 aa, Artificial Sequence
  pCV1
DSLILQTCVLLERFLMLLNSLLSMHGREKKFLIVLLITLCSTTQHFFQPLSAMAFLPLS

SEQ ID NO: 39 - protein, 13 aa, Artificial Sequence
  pCV1
MIFASPMSMQILL

SEQ ID NO: 40 - protein, 5 aa, Artificial Sequence
  pCV1
SREMM

SEQ ID NO: 41 - protein, 80 aa, Artificial Sequence
  pCV1
RQDKLVLLLIIIINCQMISWVVSLLGILGTLMLLQLVIIIINIGILDMASLGPLRETYLMCLSPLMANLAPHLLLIVIGH

SEQ ID NO: 42 - protein, 18 aa, Artificial Sequence
  pCV1
MIMVFTPLLALATNLTEL

SEQ ID NO: 43 - protein, 6 aa, Artificial Sequence
  pCV1
YFLLNF

SEQ ID NO: 44 - protein, 33 aa, Artificial Sequence
  pCV1
MHRPRFVDQNYPLTLLRTSVSILILMDSLVLVC

SEQ ID NO: 45 - protein, 32 aa, Artificial Sequence
  pCV1
LLLQRDFNHFNNLAVMFLISLIPFEILKHLKY

SEQ ID NO: 46 - protein, 9 aa, Artificial Sequence
  pCV1
TFHLALLGV

SEQ ID NO: 47 - protein, 53 aa, Artificial Sequence
  pCV1
LHLEQMLHLKLLFYIKMLTALMFLQQFMQINSHQLGAYILLETMYSRLKQAVL

SEQ ID NO: 48 - protein, 25 aa, Artificial Sequence
  pCV1
ELSMSTLLMSATFLLELAFVLLPYS

SEQ ID NO: 49 - protein, 21 aa, Artificial Sequence
  pCV1
TRKGRILQISITLAAASMSSN

SEQ ID NO: 50 - protein, 5 aa, Artificial Sequence
  pCV1
LRLFC

SEQ ID NO: 51 - protein, 29 aa, Artificial Sequence
  pCV1
HIAIFEERKARNTQYLAEARYWVFLFFLF

SEQ ID NO: 52 - protein, 4 aa, Artificial Sequence
  pCV1
IFLF

SEQ ID NO: 53 - protein, 56 aa, Artificial Sequence
  pCV1
IQLTTRFSILSCTFITREMPSWYEFPQFATYHRICYVNRYMFLSIMNRDCMANHCG

SEQ ID NO: 54 - protein, 25 aa, Artificial Sequence
  pCV1
NARCPGPRYYCFFLLLHIELFYFCQ

SEQ ID NO: 55 - protein, 19 aa, Artificial Sequence
  pCV1
MMVPPPATIEREWIRGLWD

SEQ ID NO: 56 - protein, 18 aa, Artificial Sequence
  pCV1
RDRVGLAILLVANSRLII

SEQ ID NO: 57 - protein, 5 aa, Artificial Sequence
  pCV1
SAWKL

SEQ ID NO: 58 - protein, 6 aa, Artificial Sequence
  pCV1
GGSYGS

SEQ ID NO: 59 - protein, 43 aa, Artificial Sequence
  pCV1
SGYRRSIDSTIRGSWRHRAPSRTDVAGRTFVRLRSGWRPEATQ

SEQ ID NO: 60 - protein, 9 aa, Artificial Sequence
  pCV1
FAGYGDRKA

SEQ ID NO: 61 - protein, 43 aa, Artificial Sequence
  pCV1
NNAASFDQRPFGNFGFPWRERDSPRCRSHHCCARRHHSVALSS

SEQ ID NO: 62 - protein, 11 aa, Artificial Sequence
  pCV1
ARTAIWRMAAQ

SEQ ID NO: 63 - protein, 13 aa, Artificial Sequence
  pCV1
HSCRYLRASHDRH

SEQ ID NO: 64 - protein, 11 aa, Artificial Sequence
  pCV1
SGYLADKSKRT

SEQ ID NO: 65 - protein, 12 aa, Artificial Sequence
  pCV1
RCLGRSSGGGTL

SEQ ID NO: 66 - protein, 4 aa, Artificial Sequence
  pCV1
TGSI

SEQ ID NO: 67 - protein, 14 aa, Artificial Sequence
  pCV1
NLNAMELAARLGWR

SEQ ID NO: 68 - protein, 42 aa, Artificial Sequence
  pCV1
AKCSAYVVPHLVQRSNRQNRAEGCRCRLGNGAPAGPVSARHT

SEQ ID NO: 69 - protein, 30 aa, Artificial Sequence
  pCV1
TGLSWTRRRSLGLARRSVGRICPLRERRDH

SEQ ID NO: 70 - protein, 8 aa, Artificial Sequence
  pCV1
GSWQITRD

SEQ ID NO: 71 - protein, 5 aa, Artificial Sequence
  pCV1
VDKIR

SEQ ID NO: 72 - protein, 10 aa, Artificial Sequence
  pCV1
KKGLNKKEEK

SEQ ID NO: 73 - protein, 10 aa, Artificial Sequence
  pCV1
KDQKSVTKMQ

SEQ ID NO: 74 - protein, 10 aa, Artificial Sequence
  pCV1
FFFFLLIDCN

SEQ ID NO: 75 - protein, 8 aa, Artificial Sequence
  pCV1
TRLNLKKD

SEQ ID NO: 76 - protein, 4 aa, Artificial Sequence
  pCV1
AEFK

SEQ ID NO: 77 - protein, 5 aa, Artificial Sequence
  pCV1
ILIRS

SEQ ID NO: 78 - protein, 12 aa, Artificial Sequence
  pCV1
DLTNRDSSILYI

SEQ ID NO: 79 - protein, 13 aa, Artificial Sequence
  pCV1
RYNTINKYNLEAR

SEQ ID NO: 80 - protein, 13 aa, Artificial Sequence
  pCV1
SLGLVYSFLSCSL

SEQ ID NO: 81 - protein, 22 aa, Artificial Sequence
  pCV1
IKPSITPLSTHPVYCPLCSVLK

SEQ ID NO: 82 - protein, 17 aa, Artificial Sequence
  pCV1
NLNLLLIFLLNFRFVSD

SEQ ID NO: 83 - protein, 17 aa, Artificial Sequence
  pCV1
ILVLDEILRNNYFFISL

SEQ ID NO: 84 - protein, 14 aa, Artificial Sequence
  pCV1
ERTNLFFRCEFDTT

SEQ ID NO: 85 - protein, 21 aa, Artificial Sequence
  pCV1
EKPPFIKNYIILNNIKGVPTY

SEQ ID NO: 86 - protein, 40 aa, Artificial Sequence
  pCV1
YIVKCSPRFRTFFQYSQSLLVNNPSDWISMLSLIGNKIFK

SEQ ID NO: 87 - protein, 308 aa, Artificial Sequence
  pCV1
RMTIHLLYFHANRGQENSMERWWFNSMLFKKEFERRCGLNKSMGSLGPIENTNEDPNRKVKNIHSWRNRDNSSCSNVDYLFGVKDIRNFISDDTFLVSDRNGDSYSIYFDIENHIFEIDNDHSFLSELESSFYSYRNSNYRNNGFRGEDPYYNSYMYDTQYSWNNHINSCIDSYLQSQICIDTSIISGSENYGDSYIYRAVCGGESRNSSENEGSSRRTRTKGSDLTIRESSNDLEVTQKYRHLWVQCENCYGLNYKKFLKSKMNICEQCGYHLKMSSSDRIRNHGHSCFLCEIVIRSQFHTTYEPEA

SEQ ID NO: 88 - protein, 9 aa, Artificial Sequence
  pCV1
SVKPGVPNE

SEQ ID NO: 89 - protein, 4 aa, Artificial Sequence
  pCV1
ANSH

SEQ ID NO: 90 - protein, 61 aa, Artificial Sequence
  pCV1
LRCAHCPLSSRETCRASCINESANARGEAVCVLGALPLPRSLTRCARSFGCGERYQLTQRR

SEQ ID NO: 91 - protein, 141 aa, Artificial Sequence
  pCV1
YGYPQNQGITQERTCEQKASKRPGTVKRPRCWRFSIGSAPLTSITKIDAQVRGGETRQDYKDTRRFPLEAPSCALLFRPCRLPDTCPPFSLREAWRFLIAHAVGISVRCRSFAPSWAVCTNPPFSPTAAPYPVTIVLSPTR

SEQ ID NO: 92 - protein, 20 aa, Artificial Sequence
  pCV1
DTTYRHWQQPLVTGLAERGM

SEQ ID NO: 93 - protein, 6 aa, Artificial Sequence
  pCV1
AVLQSS

SEQ ID NO: 94 - protein, 19 aa, Artificial Sequence
  pCV1
SGGLTTATLEGQYLVSALC

SEQ ID NO: 95 - protein, 43 aa, Artificial Sequence
  pCV1
SQLPSEKELVALDPANKPPLVAVVFLFASSRLRAEKKDLKKIL

SEQ ID NO: 96 - protein, 20 aa, Artificial Sequence
  pCV1
SFLRGLTLSGTKTHVKGFWS

SEQ ID NO: 97 - protein, 11 aa, Artificial Sequence
  pCV1
DYQKGSSPRSF

SEQ ID NO: 98 - protein, 23 aa, Artificial Sequence
  pCV1
IKNEVLNQSKVYMSKLGLTVTNA

SEQ ID NO: 99 - protein, 15 aa, Artificial Sequence
  pCV1
SVRHLSQRSVYFVHP

SEQ ID NO: 100 - protein, 8 aa, Artificial Sequence
  pCV1
LPDSPSCR

SEQ ID NO: 101 - protein, 14 aa, Artificial Sequence
  pCV1
LRYGRAYHLAPVLQ

SEQ ID NO: 102 - protein, 14 aa, Artificial Sequence
  pCV1
YRETHAHRLQIYQQ

SEQ ID NO: 103 - protein, 30 aa, Artificial Sequence
  pCV1
TSQPEGPSAEVVLQLYPPPSSLLIVAGKLE

SEQ ID NO: 104 - protein, 85 aa, Artificial Sequence
  pCV1
VVRQLIVCATLLPLLQASWCHARRLVWLHSAPVPNDQGELHDPPCCAKKRLAPSVLRSLSEVSWPQCYHSWLWQHCIILLLSCHP

SEQ ID NO: 105 - protein, 4 aa, Artificial Sequence
  pCV1
DAFL

SEQ ID NO: 106 - protein, 35 aa, Artificial Sequence
  pCV1
LVSTQPSHSENSVCGDRVALARRQYGIIPRHIAEL

SEQ ID NO: 107 - protein, 20 aa, Artificial Sequence
  pCV1
KCSSLENVLRGENSQGSYRC

SEQ ID NO: 108 - protein, 38 aa, Artificial Sequence
  pCV1
DPVRCNPLVHPTDLQHLLLSPAFLGEQKQEGKMPQKRE

SEQ ID NO: 109 - protein, 26 aa, Artificial Sequence
  pCV1
GRHGNVEYSYSSFFNIIEAFIRVIVS

SEQ ID NO: 110 - protein, 13 aa, Artificial Sequence
  pCV1
ADTYLNVFRKINK

SEQ ID NO: 111 - protein, 20 aa, Artificial Sequence
  pCV1
GFRAHFPEKCHLTSKKPLLS

SEQ ID NO: 112 - protein, 12 aa, Artificial Sequence
  pCV1
PIKIGVSRGPFV

SEQ ID NO: 113 - DNA, 9348 bp, Artificial Sequence; identical to SEQ ID NO: 1
  pCV1
  CDS (2)..(9346)

SEQ ID NO: 114 - protein, 4 aa, Artificial Sequence
  pCV1
RAFR

SEQ ID NO: 115 - protein, 39 aa, Artificial Sequence
  pCV1
KPLTHAAPGDGHSLSVSGCREQTSPSGRVSGCWRVSGLA

SEQ ID NO: 116 - protein, 16 aa, Artificial Sequence
  pCV1
LCGIRADCTESAPYAV

SEQ ID NO: 117 - protein, 61 aa, Artificial Sequence
  pCV1
NTAQMRKEKIPHQAPFAIQAAQLLGRAIGAGLFAITPAGERGMCCKAIKLGNARVFPVTTL

SEQ ID NO: 118 - protein, 7 aa, Artificial Sequence
  pCV1
NDGQCQA

SEQ ID NO: 119 - protein, 13 aa, Artificial Sequence
  pCV1
IEQVWSSPVGMYY

SEQ ID NO: 120 - protein, 5 aa, Artificial Sequence
  pCV1
IGVIC

SEQ ID NO: 121 - protein, 6 aa, Artificial Sequence
  pCV1
MSSRWT

SEQ ID NO: 122 - protein, 22 aa, Artificial Sequence
  pCV1
ERELTTIYALERSFLILCRSTL

SEQ ID NO: 123 - protein, 23 aa, Artificial Sequence
  pCV1
NQRALLECYCRYMRRNDQKSCIC

SEQ ID NO: 124 - protein, 9 aa, Artificial Sequence
  pCV1
RIGRSDRNA

SEQ ID NO: 125 - protein, 10 aa, Artificial Sequence
  pCV1
LLNGGIHRKY

SEQ ID NO: 126 - protein, 7 aa, Artificial Sequence
  pCV1
LGSLLPR

SEQ ID NO: 127 - protein, 14 aa, Artificial Sequence
  pCV1
WSTSSHPPCNACGY

SEQ ID NO: 128 - protein, 30 aa, Artificial Sequence
  pCV1
TEESWYPLPGISKSVTYVWWRSYSLWYRSR

SEQ ID NO: 129 - protein, 8 aa, Artificial Sequence
  pCV1
KRHNFGLC

SEQ ID NO: 130 - protein, 41 aa, Artificial Sequence
  pCV1
TRSKSRYLFHSRLGLFTRCSTRGFRRYSRLAYACSDRDLWG

SEQ ID NO: 131 - protein, 15 aa, Artificial Sequence
  pCV1
FRTTVRWRNFRTSLG

SEQ ID NO: 132 - protein, 6 aa, Artificial Sequence
  pCV1
CARCRS

SEQ ID NO: 133 - protein, 11 aa, Artificial Sequence
  pCV1
SSSSRSMCKSS

SEQ ID NO: 134 - protein, 5 aa, Artificial Sequence
  pCV1
SCSGR

SEQ ID NO: 135 - protein, 16 aa, Artificial Sequence
  pCV1
NYSRGLQMEPGTSCCL

SEQ ID NO: 136 - protein, 7 aa, Artificial Sequence
  pCV1
SMERDRI

SEQ ID NO: 137 - protein, 8 aa, Artificial Sequence
  pCV1
FCSSGRFG

SEQ ID NO: 138 - protein, 8 aa, Artificial Sequence
  pCV1
VKTVDISR

SEQ ID NO: 139 - protein, 4 aa, Artificial Sequence
  pCV1
ISRK

SEQ ID NO: 140 - protein, 15 aa, Artificial Sequence
  pCV1
RRIRRKNSSNYPSFS

SEQ ID NO: 141 - protein, 4 aa, Artificial Sequence
  pCV1
LNCN

SEQ ID NO: 142 - protein, 23 aa, Artificial Sequence
  pCV1
TRPNLLLKGLSRIQQRFYCIYFD

SEQ ID NO: 143 - protein, 14 aa, Artificial Sequence
  pCV1
VYTYLDIQDLKYKI

SEQ ID NO: 144 - protein, 40 aa, Artificial Sequence
  pCV1
KTKSKSKTQIFLLLSWIIELACLQSTFTVSILKCSLYYNK

SEQ ID NO: 145 - protein, 29 aa, Artificial Sequence
  pCV1
VNQLTTKKISRLPLRNRNSLFLHRESRVQ

SEQ ID NO: 146 - protein, 17 aa, Artificial Sequence
  pCV1
KMQARFGERFFLYCNKE

SEQ ID NO: 147 - protein, 6 aa, Artificial Sequence
  pCV1
LSTPSD

SEQ ID NO: 148 - protein, 12 aa, Artificial Sequence
  pCV1
FRVRVPGNPYGN

SEQ ID NO: 149 - protein, 4 aa, Artificial Sequence
  pCV1
KGAI

SEQ ID NO: 150 - protein, 15 aa, Artificial Sequence
  pCV1
VLIFHSLHLQNFLVW

SEQ ID NO: 151 - protein, 18 aa, Artificial Sequence
  pCV1
ILLYGYTTVGAGLVDIGI

SEQ ID NO: 152 - protein, 5 aa, Artificial Sequence
  pCV1
SILYC

SEQ ID NO: 153 - protein, 8 aa, Artificial Sequence
  pCV1
ITSLLLSF

SEQ ID NO: 154 - protein, 34 aa, Artificial Sequence
  pCV1
LIRVLGSPCNLNKPRSYHGRAGFSSSSSWSAGAR

SEQ ID NO: 155 - protein, 5 aa, Artificial Sequence
  pCV1
PVHHF

SEQ ID NO: 156 - protein, 4 aa, Artificial Sequence
  pCV1
CSSS

SEQ ID NO: 157 - protein, 14 aa, Artificial Sequence
  pCV1
LHSTYFIYEGGLLS

SEQ ID NO: 158 - protein, 16 aa, Artificial Sequence
  pCV1
IRHSLFNSGFISSILF

SEQ ID NO: 159 - protein, 7 aa, Artificial Sequence
  pCV1
CYRVSYY

SEQ ID NO: 160 - protein, 10 aa, Artificial Sequence
  pCV1
SYVWQPCHTF

SEQ ID NO: 161 - protein, 33 aa, Artificial Sequence
  pCV1
GWYLFCCHREIKCCPWLGFWFYHEQQVTVGDYY

SEQ ID NO: 162 - protein, 6 aa, Artificial Sequence
  pCV1
CCYTSM

SEQ ID NO: 163 - protein, 7 aa, Artificial Sequence
  pCV1
QPFLCCF

SEQ ID NO: 164 - protein, 12 aa, Artificial Sequence
  pCV1
THGYTDTYYDIR

SEQ ID NO: 165 - protein, 7 aa, Artificial Sequence
  pCV1
LHFRVHI

SEQ ID NO: 166 - protein, 4 aa, Artificial Sequence
  pCV1
CLFA

SEQ ID NO: 167 - protein, 6 aa, Artificial Sequence
  pCV1
CFRKVR

SEQ ID NO: 168 - protein, 7 aa, Artificial Sequence
  pCV1
TLTRVCV

SEQ ID NO: 169 - protein, 7 aa, Artificial Sequence
  pCV1
RWVSLCL

SEQ ID NO: 170 - protein, 9 aa, Artificial Sequence
  pCV1
GLSTYRCSS

SEQ ID NO: 171 - protein, 5 aa, Artificial Sequence
  pCV1
STFWF

SEQ ID NO: 172 - protein, 6 aa, Artificial Sequence
  pCV1
HFETYF

SEQ ID NO: 173 - protein, 5 aa, Artificial Sequence
  pCV1
VASWY

SEQ ID NO: 174 - protein, 4 aa, Artificial Sequence
  pCV1
HYKF

SEQ ID NO: 175 - protein, 34 aa, Artificial Sequence
  pCV1
SHSYSLFTCSRHLGHVSCSLFCWLFKANYIYAQV

SEQ ID NO: 176 - protein, 8 aa, Artificial Sequence
  pCV1
KWYNHRCC

SEQ ID NO: 177 - protein, 7 aa, Artificial Sequence
  pCV1
LFSKSTC

SEQ ID NO: 178 - protein, 5 aa, Artificial Sequence
  pCV1
TQMLC

SEQ ID NO: 179 - protein, 7 aa, Artificial Sequence
  pCV1
QRNLPDL

SEQ ID NO: 180 - protein, 13 aa, Artificial Sequence
  pCV1
FQGCSLRRCCEIP

SEQ ID NO: 181 - protein, 11 aa, Artificial Sequence
  pCV1
YYKLVSFWRGF

SEQ ID NO: 182 - protein, 13 aa, Artificial Sequence
  pCV1
IPFCLCMGEKKNF

SEQ ID NO: 183 - protein, 13 aa, Artificial Sequence
  pCV1
LLCALQLNIFFNL

SEQ ID NO: 184 - protein, 7 aa, Artificial Sequence
  pCV1
VLWRFCH

SEQ ID NO: 185 - protein, 16 aa, Artificial Sequence
  pCV1
SLLLQCLCRFFCSQGR

SEQ ID NO: 186 - protein, 13 aa, Artificial Sequence
  pCV1
CKTNSARTNWCYC

SEQ ID NO: 187 - protein, 10 aa, Artificial Sequence
  pCV1
FHGLCPCLEY

SEQ ID NO: 188 - protein, 5 aa, Artificial Sequence
  pCV1
CYFNW

SEQ ID NO: 189 - protein, 4 aa, Artificial Sequence
  pCV1
TWQA

SEQ ID NO: 190 - protein, 4 aa, Artificial Sequence
  pCV1
ERHI

SEQ ID NO: 191 - protein, 5 aa, Artificial Sequence
  pCV1
CAFLP

SEQ ID NO: 192 - protein, 9 aa, Artificial Sequence
  pCV1
WQTLHPTCS

SEQ ID NO: 193 - protein, 6 aa, Artificial Sequence
  pCV1
LLLAIK

SEQ ID NO: 194 - protein, 21 aa, Artificial Sequence
  pCV1
LWFLHHYWHWLPTLQSCSTFF

SEQ ID NO: 195 - protein, 15 aa, Artificial Sequence
  pCV1
TFKCTGHGLWTKIIH

SEQ ID NO: 196 - protein, 6 aa, Artificial Sequence
  pCV1
EPVCQF

SEQ ID NO: 197 - protein, 23 aa, Artificial Sequence
  pCV1
WTHWYWCVNSFFKEISTISTIWP

SEQ ID NO: 198 - protein, 5 aa, Artificial Sequence
  pCV1
FRSRS

SEQ ID NO: 199 - protein, 23 aa, Artificial Sequence
  pCV1
NIRHFTLLFWGCKCNYTWNKCFI

SEQ ID NO: 200 - protein, 8 aa, Artificial Sequence
  pCV1
SCCSISRC

SEQ ID NO: 201 - protein, 34 aa, Artificial Sequence
  pCV1
CFYSNSCRSTHTSLAHIFYWKQCIPDSSRLSYRS

SEQ ID NO: 202 - protein, 6 aa, Artificial Sequence
  pCV1
ACRHFL

SEQ ID NO: 203 - protein, 34 aa, Artificial Sequence
  pCV1
VRHSYWSWHLCYYHTVRLEKGEFCRYPSHWRPHR

SEQ ID NO: 204 - protein, 4 aa, Artificial Sequence
  pCV1
ALIN

SEQ ID NO: 205 - protein, 6 aa, Artificial Sequence
  pCV1
GFSANI

SEQ ID NO: 206 - protein, 35 aa, Artificial Sequence
  pCV1
QFLKKGKLEIPNILLKQDIGYFFFFYFESFYSEFS

SEQ ID NO: 207 - protein, 11 aa, Artificial Sequence
  pCV1
RRDLVSFLALS

SEQ ID NO: 208 - protein, 21 aa, Artificial Sequence
  pCV1
LVKCRVGTNSPNLRPTIGFVM

SEQ ID NO: 209 - protein, 8 aa, Artificial Sequence
  pCV1
IGICSFPL

SEQ ID NO: 210 - protein, 37 aa, Artificial Sequence
  pCV1
IAIVWPTIAGRMLDARDHVTIVSFSSFILSFSIFANK

SEQ ID NO: 211 - protein, 12 aa, Artificial Sequence
  pCV1
WYLPPPRSNGNG

SEQ ID NO: 212 - protein, 9 aa, Artificial Sequence
  pCV1
EACGIDVIG

SEQ ID NO: 213 - protein, 11 aa, Artificial Sequence
  pCV1
GWLYCWWRTPG

SEQ ID NO: 214 - protein, 275 aa, Artificial Sequence
  pCV1
SEALGSCREDPMAREAVIAEVSTQLSEVVGVIERHLEPTLLAVHLYGSAVDGGLKPHSDIDLLVTVTVRLDETTRRALINDLLETSASPGESEILRAVEVTIVVHDDIIPWRYPAKRELQFGEWQRNDILAGIFEPATIDIDLAILLTKAREHSVALVGPAAEELFDPVPEQDLFEALNETLTLWNSPPDWAGDERNVVLTLSRIWYSAVTGKIAPKDVAADWAMERLPAQYQPVILEARQAYLGQEEDRLASRADQLEEFVHYVKGEITKVVGK

SEQ ID NO: 215 - protein, 13 aa, Artificial Sequence
  pCV1
LETKWIKLDRKKV

SEQ ID NO: 216 - protein, 23 aa, Artificial Sequence
  pCV1
IKKKRNRKIKNQLRKCSNSSFFF

SEQ ID NO: 217 - protein, 9 aa, Artificial Sequence
  pCV1
LIAIKLVSI

SEQ ID NO: 218 - protein, 10 aa, Artificial Sequence
  pCV1
KKIEPSLNRF

SEQ ID NO: 219 - protein, 5 aa, Artificial Sequence
  pCV1
YDHET

SEQ ID NO: 220 - protein, 18 aa, Artificial Sequence
  pCV1
QIGIPLFYIFRRYKGIIQ

SEQ ID NO: 221 - protein, 4 aa, Artificial Sequence
  pCV1
INTI

SEQ ID NO: 222 - protein, 5 aa, Artificial Sequence
  pCV1
KLDDP

SEQ ID NO: 223 - protein, 35 aa, Artificial Sequence
  pCV1
DWYILFYPVVCSFPESSQVSHLFLPILYIVPFVPC

SEQ ID NO: 224 - protein, 11 aa, Artificial Sequence
  pCV1
NRTLIYYLFFY

SEQ ID NO: 225 - protein, 9 aa, Artificial Sequence
  pCV1
ILDLLVIRY

SEQ ID NO: 226 - protein, 40 aa, Artificial Sequence
  pCV1
TRFYETIIFLFLYRRGQISFFDANLTRHRRSRPLLKIILF

SEQ ID NO: 227 - protein, 8 aa, Artificial Sequence
  pCV1
RGFQHINI

SEQ ID NO: 228 - protein, 16 aa, Artificial Sequence
  pCV1
SVPPDSELFFNTHNPY

SEQ ID NO: 229 - protein, 12 aa, Artificial Sequence
  pCV1
LIILVIGFLCLV

SEQ ID NO: 230 - protein, 7 aa, Artificial Sequence
  pCV1
EIRYSNK

SEQ ID NO: 231 - protein, 4 aa, Artificial Sequence
  pCV1
FYSE

SEQ ID NO: 232 - protein, 36 aa, Artificial Sequence
  pCV1
LFIYCIFMQIGGKKTLWKDGGLIRCCLRRSSNAGVG

SEQ ID NO: 233 - protein, 20 aa, Artificial Sequence
  pCV1
INQWAVLVLLKIPMKIQIEK

SEQ ID NO: 234 - protein, 35 aa, Artificial Sequence
  pCV1
KTFIVGGIVTILVAVMLIIYSALKTFGISSLMTLF

SEQ ID NO: 235 - protein, 28 aa, Artificial Sequence
  pCV1
LVIGMETVIPSILILKIIFLRLTTIILF

SEQ ID NO: 236 - protein, 52 aa, Artificial Sequence
  pCV1
KVLFIVIETRIIGIMDLGAKIPTIILTCMILNIVGIITLIVALIVIFSLKSV

SEQ ID NO: 237 - protein, 4 aa, Artificial Sequence
  pCV1
ILPL

SEQ ID NO: 238 - protein, 39 aa, Artificial Sequence
  pCV1
VVVRITVTVTFIGPFVVVKVEIVVKTRVPVDELARRAVI

SEQ ID NO: 239 - protein, 8 aa, Artificial Sequence
  pCV1
EKVLMISR

SEQ ID NO: 240 - protein, 16 aa, Artificial Sequence
  pCV1
LKNTGICGFNAKIVMD

SEQ ID NO: 241 - protein, 5 aa, Artificial Sequence
  pCV1
IIRNF

SEQ ID NO: 242 - protein, 9 aa, Artificial Sequence
  pCV1
IFVNNVDII

SEQ ID NO: 243 - protein, 34 aa, Artificial Sequence
  pCV1
VVQIEFVIMVIAVSCVKLLSAHNSTQHTSRKHKV

SEQ ID NO: 244 - protein, 54 aa, Artificial Sequence
  pCV1
SLGCLMSELTHINCVALTARFPVGKPVVPAALMNRPTRGERRFAYWALFRFLAH

SEQ ID NO: 245 - protein, 28 aa, Artificial Sequence
  pCV1
LAALGRSAAASGISSLKGGNTVIHRIRG

SEQ ID NO: 246 - protein, 16 aa, Artificial Sequence
  pCV1
RRKEHVSKRPAKGQEP

SEQ ID NO: 247 - protein, 9 aa, Artificial Sequence
  pCV1
KGRVAGVFP

SEQ ID NO: 248 - protein, 4 aa, Artificial Sequence
  pCV1
APPP

SEQ ID NO: 249 - protein, 57 aa, Artificial Sequence
  pCV1
RASQKSTLKSEVAKPDRTIKIPGVSPWKLPRALSCSDPAAYRIPVRLSPFGKRGAFS

SEQ ID NO: 250 - protein, 29 aa, Artificial Sequence
  pCV1
VSQFGVGRSLQAGLCARTPRSARPLRLIR

SEQ ID NO: 251 - protein, 16 aa, Artificial Sequence
  pCV1
VQPGKTRLIATGSSHW

SEQ ID NO: 252 - protein, 16 aa, Artificial Sequence
  pCV1
QSEVCRRCYRVLEVVA

SEQ ID NO: 253 - protein, 4 aa, Artificial Sequence
  pCV1
LRLH

SEQ ID NO: 254 - protein, 20 aa, Artificial Sequence
  pCV1
KDSIWYLRSAEASYLRKKSW

SEQ ID NO: 255 - protein, 10 aa, Artificial Sequence
  pCV1
LLIRQTNHRW

SEQ ID NO: 256 - protein, 28 aa, Artificial Sequence
  pCV1
RWFFCLQAADYAQKKRISRRSFDLFYGV

SEQ ID NO: 257 - protein, 32 aa, Artificial Sequence
  pCV1
RSVERKLTLRDFGHEIIKKDLHLDPFKLKMKF

SEQ ID NO: 258 - protein, 6 aa, Artificial Sequence
  pCV1
INLKYI

SEQ ID NO: 259 - protein, 4 aa, Artificial Sequence
  pCV1
VNLV

SEQ ID NO: 260 - protein, 7 aa, Artificial Sequence
  pCV1
QLPMLNQ

SEQ ID NO: 261 - protein, 75 aa, Artificial Sequence
  pCV1
GTYLSDLSISFIHSCLTPRRVDNYDTGGLTIWPQCCNDTARPTLTGSRFISNKPASRKGRAQKWSCNFIRLHPVY

SEQ ID NO: 262 - protein, 5 aa, Artificial Sequence
  pCV1
LLPGS

SEQ ID NO: 263 - protein, 44 aa, Artificial Sequence
  pCV1
FAQRCCHCYRHRGVTLVVWYGFIQLRFPTIKASYMIPHVVQKSG

SEQ ID NO: 264 - protein, 10 aa, Artificial Sequence
  pCV1
LLRSSDRCQK

SEQ ID NO: 265 - protein, 14 aa, Artificial Sequence
  pCV1
VGRSVITHGYGSTA

SEQ ID NO: 266 - protein, 15 aa, Artificial Sequence
  pCV1
FSYCHAIRKMLFCDW

SEQ ID NO: 267 - protein, 24 aa, Artificial Sequence
  pCV1
VLNQVILRIVYAATELLLPGVNTG

SEQ ID NO: 268 - protein, 4 aa, Artificial Sequence
  pCV1
YRAT

SEQ ID NO: 269 - protein, 95 aa, Artificial Sequence
  pCV1
QNFKSAHHWKTFFGAKTLKDLTAVEIQFDVTHSCTQLIFSIFYFHQRFWVSKNRKAKCRKKGNKGDTEMLNTHTLPFSILLKHLSGLLSHERIHI

SEQ ID NO: 270 - protein, 5 aa, Artificial Sequence
  pCV1
MYLEK

SEQ ID NO: 271 - protein, 14 aa, Artificial Sequence
  pCV1
TNRGSAHISPKSAT

SEQ ID NO: 272 - protein, 12 aa, Artificial Sequence
  pCV1
RLRNHYYHDINL

SEQ ID NO: 273 - protein, 7 aa, Artificial Sequence
  pCV1
AYHEALS

SEQ ID NO: 274 - DNA, 9348 bp, Artificial Sequence; identical to SEQ ID NO: 1
  pCV1
  CDS (3)..(9347)

SEQ ID NO: 275 - protein, 10 aa, Artificial Sequence
  pCV1
ARFGDDGENL

SEQ ID NO: 276 - protein, 12 aa, Artificial Sequence
  pCV1
HMQLPETVTACL

SEQ ID NO: 277 - protein, 430 aa, Artificial Sequence
  pCV1
ADAGSRQARQGASAGVGGCRGWLNYAASEQIVLRVHHMRCEIPHRCVRRKYRIRRHSPFRLRNCWEGRSVRASSLLRQLAKGGCAARRLSWVTPGFSQSRRCKTTASAKLERDKLNKYGRPLLGCTIKPKLGLSAKNYGRAVYECLRGGLDFTKDDENVNSQPFMRWRDRFLFCAEALYKAQAETGEIKGHYLNATAGTCEEMIKRAVFARELGVPIVMHDYLTGGFTANTSLAHYCRDNGLLLHIHRAMHAVIDRQKNHGIHFRVLAKALRMSGGDHIHSGTVVGKLEGERDITLGFVDLLRDDFVEQDRSRGIYFTQDWVSLPGVLPVASGGIHVWHMPALTEIFGDDSVLQFGGGTLGHPWGNAPGAVANRVALEACVKARNEGRDLAQEGNEIIREACKWSPELAAACEVWKEIVFNFAAVDVLDK

SEQ ID NO: 278 - protein, 12 aa, Artificial Sequence
  pCV1
TLADKLAGNKEG

SEQ ID NO: 279 - protein, 13 aa, Artificial Sequence
  pCV1
GERTQVIILRSLN

SEQ ID NO: 280 - protein, 10 aa, Artificial Sequence
  pCV1
IAIKLGPIFY

SEQ ID NO: 281 - protein, 18 aa, Artificial Sequence
  pCV1
AEYNKDSIAYILTKYILT

SEQ ID NO: 282 - protein, 4 aa, Artificial Sequence
  pCV1
IYKI

SEQ ID NO: 283 - protein, 36 aa, Artificial Sequence
  pCV1
NTKSRKLNQNLRLKSFYCCLGSSSLHACSRLSQFPF

SEQ ID NO: 284 - protein, 10 aa, Artificial Sequence
  pCV1
NVLCTIINSK

SEQ ID NO: 285 - protein, 73 aa, Artificial Sequence
  pCV1
INLLLKKLVDFLFGIEIAYFYIGKVVCNEKCKHDLGRGFFSIVTRNNYLLHPTSSGFESRATHMETRKEQSEF

SEQ ID NO: 286 - protein, 39 aa, Artificial Sequence
  pCV1
FFTHFIYKIFWFGKFCCMDIQLSGLAWLTLVYSLYYTVK

SEQ ID NO: 287 - protein, 8 aa, Artificial Sequence
  pCV1
QAFYYLSS

SEQ ID NO: 288 - protein, 9 aa, Artificial Sequence
  pCV1
YVCLGVLAI

SEQ ID NO: 289 - protein, 676 aa, Artificial Sequence
  pCV1
INQDLTMAARGSHHHHHGPRGPASGSDLDRCTTFDDVQAPNYTQHTSSMRGVYYPDEIFRSDTLYLTQDLFLPFYSNVTGFHTINHTFGNPVIPFKDGIYFAATEKSNVVRGWVFGSTMNNKSQSVIIINNSTNVVIRACNFELCDNPFFAVSKPMGTQTHTMIFDNAFNCTFEYISDAFSLDVSEKSGNFKHLREFVFKNKDGFLYVYKGYQPIDVVRDLPSGFNTLKPIFKLPLGINITNFRAILTAFSPAQDIWGTSAAAYFVGYLKPTTFMLKYDENGTITDAVDCSQNPLAELKCSVKSFEIDKGIYQTSNFRVVPSGDVVRFPNITNLCPFGEVFNATKFPSVYAWERKKISNCVADYSVLYNSTFFSTFKCYGVSATKLNDLCFSNVYADSFVVKGDDVRQIAPGQTGVIADYNYKLPDDFMGCVLAWNTRNIDATSTGNYNYKYRYLRHGKLRPFERDISNVPFSPDGKPCTPPALNCYWPLNDYGFYTTTGIGYQPYRVVVLSFELLNAPATVCGPKLSTDLIKNQCVNFNFNGLTGTGVLTPSSKRFQPFQQFGRDVSDFTDSVRDPKTSEILDISPCSFGGVSVITPGTNASSEVAVLYQDVNCTDVSTAIHADQLTPAWRIYSTGNNVFQTQAGCLIGAEHVDTSYECDIPIGAGICAITIQLD

SEQ ID NO: 290 - protein, 18 aa, Artificial Sequence
  pCV1
KRANSADIHHTGGRIDEL

SEQ ID NO: 291 - protein, 12 aa, Artificial Sequence
  pCV1
LIKAFLLTYSNF

SEQ ID NO: 292 - protein, 4 aa, Artificial Sequence
  pCV1
RKES

SEQ ID NO: 293 - protein, 6 aa, Artificial Sequence
  pCV1
KYPISC

SEQ ID NO: 294 - protein, 24 aa, Artificial Sequence
  pCV1
SKILGISFFFILNLSILNSVNDEI

SEQ ID NO: 295 - protein, 9 aa, Artificial Sequence
  pCV1
YPFLHFHNS

SEQ ID NO: 296 - protein, 14 aa, Artificial Sequence
  pCV1
NAELVRIPPICDLP

SEQ ID NO: 297 - protein, 5 aa, Artificial Sequence
  pCV1
DLLCK

SEQ ID NO: 298 - protein, 20 aa, Artificial Sequence
  pCV1
VYVPFHYESRLYGQPLRVEC

SEQ ID NO: 299 - protein, 15 aa, Artificial Sequence
  pCV1
MPGTTLLLFLSPPSY

SEQ ID NO: 300 - protein, 28 aa, Artificial Sequence
  pCV1
AFLFLPINDGTSPRHDRTGMDKRLVGLT

SEQ ID NO: 301 - protein, 42 aa, Artificial Sequence
  pCV1
GRVGYTAGGELQANNLKRLEVVGRILWLVKRLSPKYRLNYQR

SEQ ID NO: 302 - protein, 25 aa, Artificial Sequence
  pCV1
LASSSAISNRRCWPYICTAPQWMAA

SEQ ID NO: 303 - protein, 11 aa, Artificial Sequence
  pCV1
SHTVILICWLR

SEQ ID NO: 304 - protein, 9 aa, Artificial Sequence
  pCV1
GLMKQRGEL

SEQ ID NO: 305 - protein, 19 aa, Artificial Sequence
  pCV1
STTFWKLRLPLERARFSAL

SEQ ID NO: 306 - protein, 48 aa, Artificial Sequence
  pCV1
KSPLLCTTTSFRGVIQLSANCNLENGSAMTFLQVSSSQPRSTLIWLSC

SEQ ID NO: 307 - protein, 10 aa, Artificial Sequence
  pCV1
QKQENIALPW

SEQ ID NO: 308 - protein, 19 aa, Artificial Sequence
  pCV1
VQRRRNSLIRFLNRIYLRR

SEQ ID NO: 309 - protein, 15 aa, Artificial Sequence
  pCV1
RYGTRRPTGLAMSEM

SEQ ID NO: 310 - protein, 11 aa, Artificial Sequence
  pCV1
CLRCPAFGTAQ

SEQ ID NO: 311 - protein, 54 aa, Artificial Sequence
  pCV1
PAKSRRRMSLPTGQWSACRPSISPSYLKLDRLILDKKKIAWPRAQISWKNLSTT

SEQ ID NO: 312 - protein, 6 aa, Artificial Sequence
  pCV1
KARSLR

SEQ ID NO: 313 - protein, 9 aa, Artificial Sequence
  pCV1
LANNSRLSG

SEQ ID NO: 314 - protein, 6 aa, Artificial Sequence
  pCV1
IEKRSK

SEQ ID NO: 315 - protein, 23 aa, Artificial Sequence
  pCV1
KRREIERSKISYENAVILLFSSN

SEQ ID NO: 316 - protein, 15 aa, Artificial Sequence
  pCV1
LQLNSSQSEKRLSRV

SEQ ID NO: 317 - protein, 25 aa, Artificial Sequence
  pCV1
IDFDTIMRLDKSGFLYSIYLEDIKV

SEQ ID NO: 318 - protein, 18 aa, Artificial Sequence
  pCV1
IQSRSSMILRIGIFFSIL

SEQ ID NO: 319 - protein, 30 aa, Artificial Sequence
  pCV1
FVVSLNQAKYHTSFYPSCILSPLFRVEIEP

SEQ ID NO: 320 - protein, 9 aa, Artificial Sequence
  pCV1
FITYFFIKF

SEQ ID NO: 321 - protein, 30 aa, Artificial Sequence
  pCV1
LDISIRRDFTKQLFFYFFIGEDKSLFSMRI

SEQ ID NO: 322 - protein, 9 aa, Artificial Sequence
  pCV1
HDIGEAALY

SEQ ID NO: 323 - protein, 6 aa, Artificial Sequence
  pCV1
KLYYFK

SEQ ID NO: 324 - protein, 29 aa, Artificial Sequence
  pCV1
YKGGSNILIYSEVFPQIQNFFSILTILIS

SEQ ID NO: 325 - protein, 5 aa, Artificial Sequence
  pCV1
LDFYA

SEQ ID NO: 326 - protein, 4 aa, Artificial Sequence
  pCV1
SDRK

SEQ ID NO: 327 - protein, 20 aa, Artificial Sequence
  pCV1
DIQINNFIANDYSSIVFSCK

SEQ ID NO: 328 - protein, 11 aa, Artificial Sequence
  pCV1
GARKLYGKMVV

SEQ ID NO: 329 - protein, 4 aa, Artificial Sequence
  pCV1
FDVV

SEQ ID NO: 330 - protein, 10 aa, Artificial Sequence
  pCV1
EGVRTQVWAK

SEQ ID NO: 331 - protein, 8 aa, Artificial Sequence
  pCV1
INGQSWSY

SEQ ID NO: 332 - protein, 10 aa, Artificial Sequence
  pCV1
RSKSKSEKHS

SEQ ID NO: 333 - protein, 4 aa, Artificial Sequence
  pCV1
LEES

SEQ ID NO: 334 - protein, 5 aa, Artificial Sequence
  pCV1
LFIRR

SEQ ID NO: 335 - protein, 7 aa, Artificial Sequence
  pCV1
RHSEFHL

SEQ ID NO: 336 - protein, 4 aa, Artificial Sequence
  pCV1
HFFS

SEQ ID NO: 337 - protein, 9 aa, Artificial Sequence
  pCV1
EWRQLFHLF

SEQ ID NO: 338 - protein, 4 aa, Artificial Sequence
  pCV1
KSYF

SEQ ID NO: 339 - protein, 7 aa, Artificial Sequence
  pCV1
QRSFFSE

SEQ ID NO: 340 - protein, 6 aa, Artificial Sequence
  pCV1
TRKFFL

SEQ ID NO: 341 - protein, 8 aa, Artificial Sequence
  pCV1
LSKLELSE

SEQ ID NO: 342 - protein, 6 aa, Artificial Sequence
  pCV1
GRRSLL

SEQ ID NO: 343 - protein, 4 aa, Artificial Sequence
  pCV1
FLHV

SEQ ID NO: 344 - protein, 15 aa, Artificial Sequence
  pCV1
LSSVSNLYRYFHYKW

SEQ ID NO: 345 - protein, 4 aa, Artificial Sequence
  pCV1
QLHL

SEQ ID NO: 346 - protein, 5 aa, Artificial Sequence
  pCV1
GRLWW

SEQ ID NO: 347 - protein, 5 aa, Artificial Sequence
  pCV1
KRGFQ

SEQ ID NO: 348 - protein, 7 aa, Artificial Sequence
  pCV1
TNSHEGQ

SEQ ID NO: 349 - protein, 7 aa, Artificial Sequence
  pCV1
FNYKRKF

SEQ ID NO: 350 - protein, 22 aa, Artificial Sequence
  pCV1
SRGNSKIQAFVGSMRKLLWIKL

SEQ ID NO: 351 - protein, 10 aa, Artificial Sequence
  pCV1
EIFEIKNEYL

SEQ ID NO: 352 - protein, 9 aa, Artificial Sequence
  pCV1
TMWISFENE

SEQ ID NO: 353 - protein, 4 aa, Artificial Sequence
  pCV1
LFPV

SEQ ID NO: 354 - protein, 23 aa, Artificial Sequence
  pCV1
NCYPLTIPHNIRAGSIKCKAWGA

SEQ ID NO: 355 - protein, 22 aa, Artificial Sequence
  pCV1
LTLIALRSLPAFQSGNLSCQLH

SEQ ID NO: 356 - protein, 56 aa, Artificial Sequence
  pCV1
IGQRAGRGGLRIGRSSASSLTDSLRSVVRLRRAVSAHSKAVIRLSTESGDNAGKNM

SEQ ID NO: 357 - protein, 44 aa, Artificial Sequence
  pCV1
AKGQQKARNRKKAALLAFFHRLRPPDEHHKNRRSSQRWRNPTGL

SEQ ID NO: 358 - protein, 48 aa, Artificial Sequence
  pCV1
RYQAFPPGSSLVRSPVPTLPLTGYLSAFLPSGSVALSHSSRCRYLSSV

SEQ ID NO: 359 - protein, 92 aa, Artificial Sequence
  pCV1
VVRSKLGCVHEPPVQPDRCALSGNYRLESNPVRHDLSPLAAATGNRISRARYVGGATEFLKWWPNYGYTRRTVFGICALLKPVTFGKRVGSS

SEQ ID NO: 360 - protein, 46 aa, Artificial Sequence
  pCV1
SGKQTTAGSGGFFVCKQQITRRKKGSQEDPLIFSTGSDAQWNENSR

SEQ ID NO: 361 - protein, 13 aa, Artificial Sequence
  pCV1
GILVMRLSKRIFT

SEQ ID NO: 362 - protein, 4 aa, Artificial Sequence
  pCV1
ILLN

SEQ ID NO: 363 - protein, 5 aa, Artificial Sequence
  pCV1
SFKSI

SEQ ID NO: 364 - protein, 4 aa, Artificial Sequence
  pCV1
SIYE

SEQ ID NO: 365 - protein, 27 aa, Artificial Sequence
  pCV1
TWSDSYQCLISEAPISAICLFRSSIVA

SEQ ID NO: 366 - protein, 4 aa, Artificial Sequence
  pCV1
LPVV

SEQ ID NO: 367 - protein, 103 aa, Artificial Sequence
  pCV1
ITTIREGLPSGPSAAMIPRDPRSPAPDLSAINQPAGRAERRSGPATLSASIQSINCCREARVSSSPVNSLRNVVAIATGIVVSRSSFGMASFSSGSQRSRRVT

SEQ ID NO: 368 - protein, 58 aa, Artificial Sequence
  pCV1
SPMLCKKAVSSFGPPIVVRSKLAAVLSLMVMAALHNSLTVMPSVRCFSVTGEYSTKSF

SEQ ID NO: 369 - protein, 50 aa, Artificial Sequence
  pCV1
CMRRPSCSCPASIRDNTAPHSRTLKVLIIGKRSSGRKLSRILPLLRSSSM

SEQ ID NO: 370 - protein, 6 aa, Artificial Sequence
  pCV1
PTRAPN

SEQ ID NO: 371 - protein, 12 aa, Artificial Sequence
  pCV1
SSASFTFTSVSG

SEQ ID NO: 372 - protein, 19 aa, Artificial Sequence
  pCV1
AKTGRQNAAKKGIRATRKC

SEQ ID NO: 373 - protein, 10 aa, Artificial Sequence
  pCV1
ILILFLFQYY

SEQ ID NO: 374 - protein, 17 aa, Artificial Sequence
  pCV1
SIYQGYCLMSGYIFECI

SEQ ID NO: 375 - protein, 19 aa, Artificial Sequence
  pCV1
KNKQIGVPRTFPRKVPPDV

SEQ ID NO: 376 - protein, 20 aa, Artificial Sequence
  pCV1
ETIIIMTLTYKNRRITRPFR

SEQ ID NO: 377 - DNA, 8040 bp, Artificial Sequence
  pCV8
tcgcgcgtttcggtgatgacggtgaaaacctctgacacatgcagctcccggagacggtcacagcttgtctgtaagcggatgccgggagcagacaagcccgtcagggcgcgtcagcgggtgttggcgggtgtcggggctggcttaactatgcggcatcagagcagattgtactgagagtgcaccatatgcggtgtgaaataccgcacagatgcgtaaggagaaaataccgcatcaggcgccattcgccattcaggctgcgcaactgttgggaagggcgatcggtgcgggcctcttcgctattacgccagctggcgaaagggggatgtgctgcaaggcgattaagttgggtaacgccagggttttcccagtcacgacgttgtaaaacgacggccagtgccaagcttgaaagagataaattgaacaagtatggtcgtcccctgttgggatgtactattaaacctaaattggggttatctgctaaaaactacggtagagccgtttatgaatgtcttcgcggtggacttgattttactaaagatgatgagaacgtgaactcacaaccatttatgcgttggagagatcgtttcttattttgtgccgaagcactttataaagcacaggctgaaacaggtgaaatcaaagggcattacttgaatgctactgcaggtacatgcgaagaaatgatcaaaagagctgtatttgctagagaattgggcgttccgatcgtaatgcatgactacttaacggggggattcaccgcaaatactagcttggctcattattgccgagataatggtctacttcttcacatccaccgtgcaatgcatgcggttattgatagacagaagaatcatggtatccacttccgggtattagcaaaagcgttacgtatgtctggtggagatcatattcactctggtaccgtagtaggtaaacttgaaggtgaaagagacataactttgggctttgttgatttactgcgtgatgattttgttgaacaagatcgaagtcgcggtatttatttcactcaagattgggtctctttaccaggtgttctacccgtggcttcaggaggtattcacgtttggcatatgcctgctctgaccgagatctttggggatgattccgtactacagttcggtggaggaactttaggacatccttggggtaatgcgccaggtgccgtagctaatcgagtagctctagaagcatgtgtaaaagctcgtaatgaaggacgtgatcttgctcaggaaggtaatgaaattattcgcgaggcttgcaaatggagcccggaactagctgctgcttgtgaagtatggaaagagatcgtatttaattttgcagcagtggacgttttggataagtaaaaacagtagacattagcagataaattagcaggaaataaagaaggataaggagaaagaactcaagtaattatccttcgttctcttaattgaattgcaattaaactcggcccaatcttttactaaaaggattgagccgaatacaacaaagattctattgcatatattttgactaagtatatacttacctagatatacaagatttgaaatacaaaatctagaaaactaaatcaaaatctaagactcaaatctttctattgttgtcttggatcatcgagcttgcatgcctgcagtcgactttcacagtttccattctgaaatgttctctgtactataataaatagtaagtgaatcaacttactactaaaaaaattagtagacttcctcttcggaatagaaatagcctatttctacatagggaaagtcgtgtgcaatgaaaaatgcaagcacgatttggggagaggttttttctctattgtaacaaggaataattatctactccatccgactagttccgggttcgagtcccgggcaacccatatggaaactagaaaggagcaatctgagttttgatttttcactcacttcatttacaaaattttttggtttggtaaattttgttgtatggatatacaactgtcggggctggcttggttgacattggtatatagtctatattatactgttaaataacaagccttctattatctttctagttaatacgtgtgcttgggagtccttgcaatttgaataaaccaagatcttaccatggccgcgcggggttctcatcatcatcatcatcatggcatggcagacaacggtactattaccgttgaggagcttaaacaactcctggaacaatggaacctagtaataggtttcctattcctagcctggattatgttactacaatttgcctattctaatcggaacaggtttttgtacataataaagcttgttttcctctggctcttgtggccagtaacacttgcttgttttgtgcttgctgttgtctacagaattaattgggtgactggcgggattgcgattgcaatggcttgtattgtaggcttgatgtggcttagctacttcgttgcttccttcaggctgtttgctcgtacccgctcaatgtggtcattcaacccagaaacaaacattcttctcaatgtgcctctccgggggacaattgtgaccagaccgctcatggaaagtgaacttgtcattggtgctgtgatcattcgtggtcacttgcgaatggccggacactccctagggcgctgtgacattaaggacctgccaaaagagatcactgtggctacatcacgaacgctttcttattacaaattaggagcgtcgcagcgtgtaggcactgattcaggttttgctgcatacaaccgctaccgtattggaaactataaattaaatacagaccacgccggtagcaacgacaatattgctttgctagtacagtaagaattcaagccgaattccagcacactggcggccgttactagtggatccgagctctaattaattaaggcttttctgctaacatatagcaatttttgaagaaaggaaagctagaaatacccaatatcttgctgaagcaagatattgggtatttcttttttttttattttgaatctttctattctgaattcagttaacgacgagatttagtatcctttcttgcactttcataactcgtgaaatgccgagttggtacgaattcccccaatttgcgacctaccataggatttgttatgtaaataggtatatgttcctttccattatgaatcgcgattgtatggccaaccattgcgggtagaatgctagatgcccgggaccacgttactattgtttctttctcctccttcatattgagcttttctatttttgccaataaatgatggtacctccccccgccacgatcgaacgggaatggataagaggcttgtgggattgacgtgatagggtagggttggctatactgctggtggcgaactccaggctaataatctgaagcgcttggaagttgtagggaggatcctatggctcgtgaagcggttatcgccgaagtatcgactcaactatcagaggtagttggcgtcatcgagcgccatctcgaaccgacgttgctggccgtacatttgtacggctccgcagtggatggcggcctgaagccacacagtgatattgatttgctggttacggtgaccgtaaggcttgatgaaacaacgcggcgagctttgatcaacgaccttttggaaacttcggcttcccctggagagagcgagattctccgcgctgtagaagtcaccattgttgtgcacgacgacatcattccgtggcgttatccagctaagcgcgaactgcaatttggagaatggcagcgcaatgacattcttgcaggtatcttcgagccagccacgatcgacattgatctggctatcttgctgacaaaagcaagagaacatagcgttgccttggtaggtccagcggcggaggaactctttgatccggttcctgaacaggatctatttgaggcgctaaatgaaaccttaacgctatggaactcgccgcccgactgggctggcgatgagcgaaatgtagtgcttacgttgtcccgcatttggtacagcgcagtaaccggcaaaatcgcgccgaaggatgtcgctgccgactgggcaatggagcgcctgccggcccagtatcagcccgtcatacttgaagctagacaggcttatcttggacaagaagaagatcgcttggcctcgcgcgcagatcagttggaagaatttgtccactacgtgaaaggcgagatcactaaggtagttggcaaataactcgagactaagtggataaaattagatagaaaaaaggtctaaataaaaaagaagagaaatagaaagatcaaaaatcagttacgaaaatgcagtaattcttcttttttcttctaattgattgcaattaaactcgtctcaatctgaaaaaagattgagccgagtttaaatagattttgatacgatcatgagacttgacaaatcgggattcctctattctatatatttagaagatataaaggtataatacaataaataaatacaatctagaagctcgatgatccttaggattggtatattcttttctatcctgtagtttgtagtttccctgaatcaagccaagtatcacacctctttctacccatcctgtatattgtcccctttgttccgtgttgaaatagaaccttaatttattacttatttttttattaaattttagatttgttagtgattagatattagtattagacgagattttacgaaacaattatttttttatttctttataggagaggacaaatctcttttttcgatgcgaatttgacacgacataggagaagccgccctttattaaaaattatattattttaaataatataaagggggttccaacatattaatatatagtgaagtgttcccccagattcagaactttttttcaatactcacaatccttattagttaataatcctagtgattggatttctatgcttagtctgataggaaataagatattcaaataaataattttatagcgaatgactattcatctattgtattttcatgcaaatagggggcaagaaaactctatggaaagatggtggtttaattcgatgttgtttaagaaggagttcgaacgcaggtgtgggctaaataaatcaatgggcagtcttggtcctattgaaaataccaatgaagatccaaatcgaaaagtgaaaaacattcatagttggaggaatcgtgacaattctagttgcagtaatgttgattatttattcggcgttaaagacattcggaatttcatctctgatgacacttttttagttagtgataggaatggagacagttattccatctattttgatattgaaaatcatatttttgagattgacaacgatcattcttttctgagtgaactagaaagttctttttatagttatcgaaactcgaattatcggaataatggatttaggggcgaagatccctactataattcttacatgtatgatactcaatatagttggaataatcacattaatagttgcattgatagttatcttcagtctcaaatctgtatagatacttccattataagtggtagtgagaattacggtgacagttacatttatagggccgtttgtggtggtgaaagtcgaaatagtagtgaaaacgagggttccagtagacgaactcgcacgaagggcagtgatttaactataagagaaagttctaatgatctcgaggtaactcaaaaatacaggcatttgtgggttcaatgcgaaaattgttatggattaaattataagaaatttttgaaatcaaaaatgaatatttgtgaacaatgtggatatcatttgaaaatgagtagttcagatagaattcgtaatcatggtcatagctgtttcctgtgtgaaattgttatccgctcacaattccacacaacatacgagccggaagcataaagtgtaaagcctggggtgcctaatgagtgagctaactcacattaattgcgttgcgctcactgcccgctttccagtcgggaaacctgtcgtgccagctgcattaatgaatcggccaacgcgcggggagaggcggtttgcgtattgggcgctcttccgcttcctcgctcactgactcgctgcgctcggtcgttcggctgcggcgagcggtatcagctcactcaaaggcggtaatacggttatccacagaatcaggggataacgcaggaaagaacatgtgagcaaaaggccagcaaaaggccaggaaccgtaaaaaggccgcgttgctggcgtttttccataggctccgcccccctgacgagcatcacaaaaatcgacgctcaagtcagaggtggcgaaacccgacaggactataaagataccaggcgtttccccctggaagctccctcgtgcgctctcctgttccgaccctgccgcttaccggatacctgtccgcctttctcccttcgggaagcgtggcgctttctcatagctcacgctgtaggtatctcagttcggtgtaggtcgttcgctccaagctgggctgtgtgcacgaaccccccgttcagcccgaccgctgcgccttatccggtaactatcgtcttgagtccaacccggtaagacacgacttatcgccactggcagcagccactggtaacaggattagcagagcgaggtatgtaggcggtgctacagagttcttgaagtggtggcctaactacggctacactagaaggacagtatttggtatctgcgctctgctgaagccagttaccttcggaaaaagagttggtagctcttgatccggcaaacaaaccaccgctggtagcggtggtttttttgtttgcaagcagcagattacgcgcagaaaaaaaggatctcaagaagatcctttgatcttttctacggggtctgacgctcagtggaacgaaaactcacgttaagggattttggtcatgagattatcaaaaaggatcttcacctagatccttttaaattaaaaatgaagttttaaatcaatctaaagtatatatgagtaaacttggtctgacagttaccaatgcttaatcagtgaggcacctatctcagcgatctgtctatttcgttcatccatagttgcctgactccccgtcgtgtagataactacgatacgggagggcttaccatctggccccagtgctgcaatgataccgcgagacccacgctcaccggctccagatttatcagcaataaaccagccagccggaagggccgagcgcagaagtggtcctgcaactttatccgcctccatccagtctattaattgttgccgggaagctagagtaagtagttcgccagttaatagtttgcgcaacgttgttgccattgctacaggcatcgtggtgtcacgctcgtcgtttggtatggcttcattcagctccggttcccaacgatcaaggcgagttacatgatcccccatgttgtgcaaaaaagcggttagctccttcggtcctccgatcgttgtcagaagtaagttggccgcagtgttatcactcatggttatggcagcactgcataattctcttactgtcatgccatccgtaagatgcttttctgtgactggtgagtactcaaccaagtcattctgagaatagtgtatgcggcgaccgagttgctcttgcccggcgtcaatacgggataataccgcgccacatagcagaactttaaaagtgctcatcattggaaaacgttcttcggggcgaaaactctcaaggatcttaccgctgttgagatccagttcgatgtaacccactcgtgcacccaactgatcttcagcatcttttactttcaccagcgtttctgggtgagcaaaaacaggaaggcaaaatgccgcaaaaaagggaataagggcgacacggaaatgttgaatactcatactcttcctttttcaatattattgaagcatttatcagggttattgtctcatgagcggatacatatttgaatgtatttagaaaaataaacaaataggggttccgcgcacatttccccgaaaagtgccacctgacgtctaagaaaccattattatcatgacattaacctataaaaataggcgtatcacgaggccctttcgtc

SEQ ID NO: 378 - DNA, 8082 bp, Artificial Sequence
  pCV8
  CDS (1)..(8082)
tcgcgcgtttcggtgatgacggtgaaaacctctgacacatgcagctcccggagacggtcacagcttgtctgtaagcggatgccgggagcagacaagcccgtcagggcgcgtcagcgggtgttggcgggtgtcggggctggcttaactatgcggcatcagagcagattgtactgagagtgcaccatatgcggtgtgaaataccgcacagatgcgtaaggagaaaataccgcatcaggcgccattcgccattcaggctgcgcaactgttgggaagggcgatcggtgcgggcctcttcgctattacgccagctggcgaaagggggatgtgctgcaaggcgattaagttgggtaacgccagggttttcccagtcacgacgttgtaaaacgacggccagtgccaagcttgaaagagataaattgaacaagtatggtcgtcccctgttgggatgtactattaaacctaaattggggttatctgctaaaaactacggtagagccgtttatgaatgtcttcgcggtggacttgattttactaaagatgatgagaacgtgaactcacaaccatttatgcgttggagagatcgtttcttattttgtgccgaagcactttataaagcacaggctgaaacaggtgaaatcaaagggcattacttgaatgctactgcaggtacatgcgaagaaatgatcaaaagagctgtatttgctagagaattgggcgttccgatcgtaatgcatgactacttaacggggggattcaccgcaaatactagcttggctcattattgccgagataatggtctacttcttcacatccaccgtgcaatgcatgcggttattgatagacagaagaatcatggtatccacttccgggtattagcaaaagcgttacgtatgtctggtggagatcatattcactctggtaccgtagtaggtaaacttgaaggtgaaagagacataactttgggctttgttgatttactgcgtgatgattttgttgaacaagatcgaagtcgcggtatttatttcactcaagattgggtctctttaccaggtgttctacccgtggcttcaggaggtattcacgtttggcatatgcctgctctgaccgagatctttggggatgattccgtactacagttcggtggaggaactttaggacatccttggggtaatgcgccaggtgccgtagctaatcgagtagctctagaagcatgtgtaaaagctcgtaatgaaggacgtgatcttgctcaggaaggtaatgaaattattcgcgaggcttgcaaatggagcccggaactagctgctgcttgtgaagtatggaaagagatcgtatttaattttgcagcagtggacgttttggataagtaaaaacagtagacattagcagataaattagcaggaaataaagaaggataaggagaaagaactcaagtaattatccttcgttctcttaattgaattgcaattaaactcggcccaatcttttactaaaaggattgagccgaatacaacaaagattctattgcatatattttgactaagtatatacttacctagatatacaagatttgaaatacaaaatctagaaaactaaatcaaaatctaagactcaaatctttctattgttgtcttggatcatcgagcttgcatgcctgcagtcgactttcacagtttccattctgaaatgttctctgtactataataaatagtaagtgaatcaacttactactaaaaaaattagtagacttcctcttcggaatagaaatagcctatttctacatagggaaagtcgtgtgcaatgaaaaatgcaagcacgatttggggagaggttttttctctattgtaacaaggaataattatctactccatccgactagttccgggttcgagtcccgggcaacccatatggaaactagaaaggagcaatctgagttttgatttttcactcacttcatttacaaaattttttggtttggtaaattttgttgtatggatatacaactgtcggggctggcttggttgacattggtatatagtctatattatactgttaaataacaagccttctattatctttctagttaatacgtgtgcttgggagtccttgcaatttgaataaaccaagatcttaccatggccgcgcggggttctcatcatcatcatcatggtccgcgggggcccgctagcaggatctgcagaattcggcttggatccatggcagacaacggtactattaccgttgaggagcttaaacaactcctggaacaatggaacctagtaataggtttcctattcctagcctggattatgttactacaatttgcctattctaatcggaacaggtttttgtacataataaagcttgttttcctctggctcttgtggccagtaacacttgcttgttttgtgcttgctgttgtctacagaattaattgggtgactggcgggattgcgattgcaatggcttgtattgtaggcttgatgtggcttagctacttcgttgcttccttcaggctgtttgctcgtacccgctcaatgtggtcattcaacccagaaacaaacattcttctcaatgtgcctctccgggggacaattgtgaccagaccgctcatggaaagtgaacttgtcattggtgctgtgatcattcgtggtcacttgcgaatggccggacactccctagggcgctgtgacattaaggacctgccaaaagagatcactgtggctacatcacgaacgctttcttattacaaattaggagcgtcgcagcgtgtaggcactgattcaggttttgctgcatacaaccgctaccgtattggaaactataaattaaatacagaccacgccggtagcaacgacaatattgctttgctagtacagtaagaattcaagccgaattccagcacactggcggccgttactagtggatccgagctctaattaattaaggcttttctgctaacatatagcaatttttgaagaaaggaaagctagaaatacccaatatcttgctgaagcaagatattgggtatttcttttttttttattttgaatctttctattctgaattcagttaacgacgagatttagtatcctttcttgcactttcataactcgtgaaatgccgagttggtacgaattcccccaatttgcgacctaccataggatttgttatgtaaataggtatatgttcctttccattatgaatcgcgattgtatggccaaccattgcgggtagaatgctagatgcccgggaccacgttactattgtttctttctcctccttcatattgagcttttctatttttgccaataaatgatggtacctccccccgccacgatcgaacgggaatggataagaggcttgtgggattgacgtgatagggtagggttggctatactgctggtggcgaactccaggctaataatctgaagcgcttggaagttgtagggaggatcctatggctcgtgaagcggttatcgccgaagtatcgactcaactatcagaggtagttggcgtcatcgagcgccatctcgaaccgacgttgctggccgtacatttgtacggctccgcagtggatggcggcctgaagccacacagtgatattgatttgctggttacggtgaccgtaaggcttgatgaaacaacgcggcgagctttgatcaacgaccttttggaaacttcggcttcccctggagagagcgagattctccgcgctgtagaagtcaccattgttgtgcacgacgacatcattccgtggcgttatccagctaagcgcgaactgcaatttggagaatggcagcgcaatgacattcttgcaggtatcttcgagccagccacgatcgacattgatctggctatcttgctgacaaaagcaagagaacatagcgttgccttggtaggtccagcggcggaggaactctttgatccggttcctgaacaggatctatttgaggcgctaaatgaaaccttaacgctatggaactcgccgcccgactgggctggcgatgagcgaaatgtagtgcttacgttgtcccgcatttggtacagcgcagtaaccggcaaaatcgcgccgaaggatgtcgctgccgactgggcaatggagcgcctgccggcccagtatcagcccgtcatacttgaagctagacaggcttatcttggacaagaagaagatcgcttggcctcgcgcgcagatcagttggaagaatttgtccactacgtgaaaggcgagatcactaaggtagttggcaaataactcgagactaagtggataaaattagatagaaaaaaggtctaaataaaaaagaagagaaatagaaagatcaaaaatcagttacgaaaatgcagtaattcttcttttttcttctaattgattgcaattaaactcgtctcaatctgaaaaaagattgagccgagtttaaatagattttgatacgatcatgagacttgacaaatcgggattcctctattctatatatttagaagatataaaggtataatacaataaataaatacaatctagaagctcgatgatccttaggattggtatattcttttctatcctgtagtttgtagtttccctgaatcaagccaagtatcacacctctttctacccatcctgtatattgtcccctttgttccgtgttgaaatagaaccttaatttattacttatttttttattaaattttagatttgttagtgattagatattagtattagacgagattttacgaaacaattatttttttatttctttataggagaggacaaatctcttttttcgatgcgaatttgacacgacataggagaagccgccctttattaaaaattatattattttaaataatataaagggggttccaacatattaatatatagtgaagtgttcccccagattcagaactttttttcaatactcacaatccttattagttaataatcctagtgattggatttctatgcttagtctgataggaaataagatattcaaataaataattttatagcgaatgactattcatctattgtattttcatgcaaatagggggcaagaaaactctatggaaagatggtggtttaattcgatgttgtttaagaaggagttcgaacgcaggtgtgggctaaataaatcaatgggcagtcttggtcctattgaaaataccaatgaagatccaaatcgaaaagtgaaaaacattcatagttggaggaatcgtgacaattctagttgcagtaatgttgattatttattcggcgttaaagacattcggaatttcatctctgatgacacttttttagttagtgataggaatggagacagttattccatctattttgatattgaaaatcatatttttgagattgacaacgatcattcttttctgagtgaactagaaagttctttttatagttatcgaaactcgaattatcggaataatggatttaggggcgaagatccctactataattcttacatgtatgatactcaatatagttggaataatcacattaatagttgcattgatagttatcttcagtctcaaatctgtatagatacttccattataagtggtagtgagaattacggtgacagttacatttatagggccgtttgtggtggtgaaagtcgaaatagtagtgaaaacgagggttccagtagacgaactcgcacgaagggcagtgatttaactataagagaaagttctaatgatctcgaggtaactcaaaaatacaggcatttgtgggttcaatgcgaaaattgttatggattaaattataagaaatttttgaaatcaaaaatgaatatttgtgaacaatgtggatatcatttgaaaatgagtagttcagatagaattcgtaatcatggtcatagctgtttcctgtgtgaaattgttatccgctcacaattccacacaacatacgagccggaagcataaagtgtaaagcctggggtgcctaatgagtgagctaactcacattaattgcgttgcgctcactgcccgctttccagtcgggaaacctgtcgtgccagctgcattaatgaatcggccaacgcgcggggagaggcggtttgcgtattgggcgctcttccgcttcctcgctcactgactcgctgcgctcggtcgttcggctgcggcgagcggtatcagctcactcaaaggcggtaatacggttatccacagaatcaggggataacgcaggaaagaacatgtgagcaaaaggccagcaaaaggccaggaaccgtaaaaaggccgcgttgctggcgtttttccataggctccgcccccctgacgagcatcacaaaaatcgacgctcaagtcagaggtggcgaaacccgacaggactataaagataccaggcgtttccccctggaagctccctcgtgcgctctcctgttccgaccctgccgcttaccggatacctgtccgcctttctcccttcgggaagcgtggcgctttctcatagctcacgctgtaggtatctcagttcggtgtaggtcgttcgctccaagctgggctgtgtgcacgaaccccccgttcagcccgaccgctgcgccttatccggtaactatcgtcttgagtccaacccggtaagacacgacttatcgccactggcagcagccactggtaacaggattagcagagcgaggtatgtaggcggtgctacagagttcttgaagtggtggcctaactacggctacactagaaggacagtatttggtatctgcgctctgctgaagccagttaccttcggaaaaagagttggtagctcttgatccggcaaacaaaccaccgctggtagcggtggtttttttgtttgcaagcagcagattacgcgcagaaaaaaaggatctcaagaagatcctttgatcttttctacggggtctgacgctcagtggaacgaaaactcacgttaagggattttggtcatgagattatcaaaaaggatcttcacctagatccttttaaattaaaaatgaagttttaaatcaatctaaagtatatatgagtaaacttggtctgacagttaccaatgcttaatcagtgaggcacctatctcagcgatctgtctatttcgttcatccatagttgcctgactccccgtcgtgtagataactacgatacgggagggcttaccatctggccccagtgctgcaatgataccgcgagacccacgctcaccggctccagatttatcagcaataaaccagccagccggaagggccgagcgcagaagtggtcctgcaactttatccgcctccatccagtctattaattgttgccgggaagctagagtaagtagttcgccagttaatagtttgcgcaacgttgttgccattgctacaggcatcgtggtgtcacgctcgtcgtttggtatggcttcattcagctccggttcccaacgatcaaggcgagttacatgatcccccatgttgtgcaaaaaagcggttagctccttcggtcctccgatcgttgtcagaagtaagttggccgcagtgttatcactcatggttatggcagcactgcataattctcttactgtcatgccatccgtaagatgcttttctgtgactggtgagtactcaaccaagtcattctgagaatagtgtatgcggcgaccgagttgctcttgcccggcgtcaatacgggataataccgcgccacatagcagaactttaaaagtgctcatcattggaaaacgttcttcggggcgaaaactctcaaggatcttaccgctgttgagatccagttcgatgtaacccactcgtgcacccaactgatcttcagcatcttttactttcaccagcgtttctgggtgagcaaaaacaggaaggcaaaatgccgcaaaaaagggaataagggcgacacggaaatgttgaatactcatactcttcctttttcaatattattgaagcatttatcagggttattgtctcatgagcggatacatatttgaatgtatttagaaaaataaacaaataggggttccgcgcacatttccccgaaaagtgccacctgacgtctaagaaaccattattatcatgacattaacctataaaaataggcgtatcacgaggccctttcgtc

SEQ ID NO: 379 - protein, 57 aa, Artificial Sequence; identical to SEQ ID NO: 2
  pCV8

SEQ ID NO: 380 - protein, 13 aa, Artificial Sequence
  pCV8
ECTICGVKYRTDA

SEQ ID NO: 381 - protein, 41 aa, Artificial Sequence; identical to SEQ ID NO: 4
  pCV8

SEQ ID NO: 382 - protein, 22 aa, Artificial Sequence
  pCV8
RQGFPSHDVVKRRPVPSLKEIN

SEQ ID NO: 383 - protein, 43 aa, Artificial Sequence; identical to SEQ ID NO: 6
  pCV8

SEQ ID NO: 384 - protein, 33 aa, Artificial Sequence; identical to SEQ ID NO: 7
  pCV8

SEQ ID NO: 385 - protein, 9 aa, Artificial Sequence
  pCV8
MLLQVHAKK

SEQ ID NO: 386 - protein, 14 aa, Artificial Sequence
  pCV8
SKELYLLENWAFRS

SEQ ID NO: 387 - protein, 4 aa, Artificial Sequence
  pCV8
CMTT

SEQ ID NO: 388 - protein, 43 aa, Artificial Sequence; identical to SEQ ID NO: 11
  pCV8

SEQ ID NO: 389 - protein, 16 aa, Artificial Sequence
  pCV8
QKRYVCLVEIIFTLVP

SEQ ID NO: 390 - protein, 8 aa, Artificial Sequence
  pCV8
VNLKVKET

SEQ ID NO: 391 - protein, 48 aa, Artificial Sequence; identical to SEQ ID NO: 14
  pCV8

SEQ ID NO: 392 - protein, 16 aa, Artificial Sequence
  pCV8
PRSLGMIPYYSSVEEL

SEQ ID NO: 393 - protein, 10 aa, Artificial Sequence
  pCV8
DILGVMRQVP

SEQ ID NO: 394 - protein, 26 aa, Artificial Sequence
  pCV8
KLVMKDVILLRKVMKLFARLANGARN

SEQ ID NO: 395 - protein, 27 aa, Artificial Sequence
  pCV8
LLLVKYGKRSYLILQQWTFWISKNSRH

SEQ ID NO: 396 - protein, 12 aa, Artificial Sequence
  pCV8
QEIKKDKEKELK

SEQ ID NO: 397 - protein, 33 aa, Artificial Sequence; identical to SEQ ID NO: 20
  pCV8

SEQ ID NO: 398 - protein, 18 aa, Artificial Sequence
  pCV8
LSIYLPRYTRFEIQNLEN

SEQ ID NO: 399 - protein, 31 aa, Artificial Sequence; identical to SEQ ID NO: 22
  pCV8

SEQ ID NO: 400 - protein, 8 aa, Artificial Sequence
  pCV8
IVSESTYY

SEQ ID NO: 401 - protein, 5 aa, Artificial Sequence
  pCV8
TSSSE

SEQ ID NO: 402 - protein, 4 aa, Artificial Sequence
  pCV8
PIST

SEQ ID NO: 403 - protein, 20 aa, Artificial Sequence
  pCV8
GKSCAMKNASTIWGEVFSLL

SEQ ID NO: 404 - protein, 58 aa, Artificial Sequence; identical to SEQ ID NO: 27
  pCV8

SEQ ID NO: 405 - protein, 31 aa, Artificial Sequence; identical to SEQ ID NO: 28
  pCV8

SEQ ID NO: 406 - protein, 52 aa, Artificial Sequence
  pCV8
TKILPWPRGVLIIIIMVRGGPLAGSAEFGLDPWQTTVLLPLRSLNNSWNNGT

SEQ ID NO: 407 - protein, 4 aa, Artificial Sequence
  pCV8
VSYS

SEQ ID NO: 408 - protein, 18 aa, Artificial Sequence
  pCV8
PGLCYYNLPILIGTGFCT

SEQ ID NO: 409 - protein, 10 aa, Artificial Sequence
  pCV8
SLFSSGSCGQ

SEQ ID NO: 410 - protein, 15 aa, Artificial Sequence
  pCV8
HLLVLCLLLSTELIG

SEQ ID NO: 411 - protein, 11 aa, Artificial Sequence
  pCV8
LAGLRLQWLVL

SEQ ID NO: 412 - protein, 38 aa, Artificial Sequence
  pCV8
CGLATSLLPSGCLLVPAQCGHSTQKQTFFSMCLSGGQL

SEQ ID NO: 413 - protein, 13 aa, Artificial Sequence
  pCV8
PDRSWKVNLSLVL

SEQ ID NO: 414 - protein, 12 aa, Artificial Sequence
  pCV8
SFVVTCEWPDTP

SEQ ID NO: 415 - protein, 24 aa, Artificial Sequence
  pCV8
GAVTLRTCQKRSLWLHHERFLITN

SEQ ID NO: 416 - protein, 5 aa, Artificial Sequence
  pCV8
ERRSV

SEQ ID NO: 417 - protein, 18 aa, Artificial Sequence
  pCV8
ALIQVLLHTTATVLETIN

SEQ ID NO: 418 - protein, 13 aa, Artificial Sequence
  pCV8
IQTTPVATTILLC

SEQ ID NO: 419 - protein, 22 aa, Artificial Sequence
  pCV8
YSKNSSRIPAHWRPLLVDPSSN

SEQ ID NO: 420 - protein, 5 aa, Artificial Sequence
  pCV8
LRLFC

SEQ ID NO: 421 - protein, 29 aa, Artificial Sequence
  pCV8
HIAIFEERKARNTQYLAEARYWVFLFFLF

SEQ ID NO: 422 - protein, 4 aa, Artificial Sequence
  pCV8
IFLF

SEQ ID NO: 423 - protein, 56 aa, Artificial Sequence; identical to SEQ ID NO: 53
  pCV8

SEQ ID NO: 424 - protein, 25 aa, Artificial Sequence
  pCV8
NARCPGPRYYCFFLLLHIELFYFCQ

SEQ ID NO: 425 - protein, 19 aa, Artificial Sequence
  pCV8
MMVPPPATIEREWIRGLWD

SEQ ID NO: 426 - protein, 18 aa, Artificial Sequence
  pCV8
RDRVGLAILLVANSRLII

SEQ ID NO: 427 - protein, 5 aa, Artificial Sequence
  pCV8
SAWKL

SEQ ID NO: 428 - protein, 6 aa, Artificial Sequence
  pCV8
GGSYGS

SEQ ID NO: 429 - protein, 43 aa, Artificial Sequence; identical to SEQ ID NO: 59
  pCV8

SEQ ID NO: 430 - protein, 9 aa, Artificial Sequence
  pCV8
FAGYGDRKA

SEQ ID NO: 431 - protein, 43 aa, Artificial Sequence; identical to SEQ ID NO: 61
  pCV8

SEQ ID NO: 432 - protein, 11 aa, Artificial Sequence
  pCV8
ARTAIWRMAAQ

SEQ ID NO: 433 - protein, 13 aa, Artificial Sequence
  pCV8
HSCRYLRASHDRH

SEQ ID NO: 434 - protein, 11 aa, Artificial Sequence
  pCV8
SGYLADKSKRT

SEQ ID NO: 435 - protein, 12 aa, Artificial Sequence
  pCV8
RCLGRSSGGGTL

SEQ ID NO: 436 - protein, 4 aa, Artificial Sequence
  pCV8
TGSI

SEQ ID NO: 437 - protein, 14 aa, Artificial Sequence
  pCV8
NLNAMELAARLGWR

SEQ ID NO: 438 - protein, 42 aa, Artificial Sequence; identical to SEQ ID NO: 68
  pCV8

SEQ ID NO: 439 - protein, 30 aa, Artificial Sequence; identical to SEQ ID NO: 69
  pCV8

SEQ ID NO: 440 - protein, 8 aa, Artificial Sequence
  pCV8
GSWQITRD

SEQ ID NO: 441 - protein, 5 aa, Artificial Sequence
  pCV8
VDKIR

SEQ ID NO: 442 - protein, 10 aa, Artificial Sequence
  pCV8
KKGLNKKEEK

SEQ ID NO: 443 - protein, 10 aa, Artificial Sequence
  pCV8
KDQKSVTKMQ

SEQ ID NO: 444 - protein, 10 aa, Artificial Sequence
  pCV8
FFFFLLIDCN

SEQ ID NO: 445 - protein, 8 aa, Artificial Sequence
  pCV8
TRLNLKKD

SEQ ID NO: 446 - protein, 4 aa, Artificial Sequence
  pCV8
AEFK

SEQ ID NO: 447 - protein, 5 aa, Artificial Sequence
  pCV8
ILIRS

SEQ ID NO: 448 - protein, 12 aa, Artificial Sequence
  pCV8
DLTNRDSSILYI

SEQ ID NO: 449 - protein, 13 aa, Artificial Sequence
  pCV8
RYNTINKYNLEAR

SEQ ID NO: 450 - protein, 13 aa, Artificial Sequence
  pCV8
SLGLVYSFLSCSL

SEQ ID NO: 451 - protein, 22 aa, Artificial Sequence
  pCV8
IKPSITPLSTHPVYCPLCSVLK

SEQ ID NO: 452 - protein, 17 aa, Artificial Sequence
  pCV8
NLNLLLIFLLNFRFVSD

SEQ ID NO: 453 - protein, 17 aa, Artificial Sequence
  pCV8
ILVLDEILRNNYFFISL

SEQ ID NO: 454 - protein, 14 aa, Artificial Sequence
  pCV8
ERTNLFFRCEFDTT

SEQ ID NO: 455 - protein, 21 aa, Artificial Sequence
  pCV8
EKPPFIKNYIILNNIKGVPTY

SEQ ID NO: 456 - protein, 40 aa, Artificial Sequence; identical to SEQ ID NO: 86
  pCV8

SEQ ID NO: 457 - protein, 308 aa, Artificial Sequence; identical to SEQ ID NO: 87
  pCV8

SEQ ID NO: 458 - protein, 9 aa, Artificial Sequence
  pCV8
SVKPGVPNE

SEQ ID NO: 459 - protein, 4 aa, Artificial Sequence
  pCV8
ANSH

SEQ ID NO: 460 - protein, 61 aa, Artificial Sequence; identical to SEQ ID NO: 90
  pCV8

SEQ ID NO: 461 - protein, 141 aa, Artificial Sequence; identical to SEQ ID NO: 91
  pCV8

SEQ ID NO: 462 - protein, 20 aa, Artificial Sequence
  pCV8
DTTYRHWQQPLVTGLAERGM

SEQ ID NO: 463 - protein, 6 aa, Artificial Sequence
  pCV8
AVLQSS

SEQ ID NO: 464 - protein, 19 aa, Artificial Sequence
  pCV8
SGGLTTATLEGQYLVSALC

SEQ ID NO: 465 - protein, 43 aa, Artificial Sequence; identical to SEQ ID NO: 95
  pCV8

SEQ ID NO: 466 - protein, 20 aa, Artificial Sequence
  pCV8
SFLRGLTLSGTKTHVKGFWS

SEQ ID NO: 467 - protein, 11 aa, Artificial Sequence
  pCV8
DYQKGSSPRSF

SEQ ID NO: 468 - protein, 23 aa, Artificial Sequence
  pCV8
IKNEVLNQSKVYMSKLGLTVTNA

SEQ ID NO: 469 - protein, 15 aa, Artificial Sequence
  pCV8
SVRHLSQRSVYFVHP

SEQ ID NO: 470 - protein, 8 aa, Artificial Sequence
  pCV8
LPDSPSCR

SEQ ID NO: 471 - protein, 14 aa, Artificial Sequence
  pCV8
LRYGRAYHLAPVLQ

SEQ ID NO: 472 - protein, 14 aa, Artificial Sequence
  pCV8
YRETHAHRLQIYQQ

SEQ ID NO: 473 - protein, 30 aa, Artificial Sequence; identical to SEQ ID NO: 103
  pCV8

SEQ ID NO: 474 - protein, 85 aa, Artificial Sequence; identical to SEQ ID NO: 104
  pCV8

SEQ ID NO: 475 - protein, 4 aa, Artificial Sequence
  pCV8
DAFL

SEQ ID NO: 476 - protein, 35 aa, Artificial Sequence; identical to SEQ ID NO: 106
  pCV8

SEQ ID NO: 477 - protein, 20 aa, Artificial Sequence
  pCV8
KCSSLENVLRGENSQGSYRC

SEQ ID NO: 478 - protein, 38 aa, Artificial Sequence; identical to SEQ ID NO: 108
  pCV8

SEQ ID NO: 479 - protein, 26 aa, Artificial Sequence
  pCV8
GRHGNVEYSYSSFFNIIEAFIRVIVS

SEQ ID NO: 480 - protein, 13 aa, Artificial Sequence
  pCV8
ADTYLNVFRKINK

SEQ ID NO: 481 - protein, 20 aa, Artificial Sequence
  pCV8
GFRAHFPEKCHLTSKKPLLS

SEQ ID NO: 482 - protein, 12 aa, Artificial Sequence
  pCV8
PIKIGVSRGPFV

SEQ ID NO: 483 - DNA, 8082 bp, Artificial Sequence; identical to SEQ ID NO: 378
  pCV8
  CDS (2)..(8080)

SEQ ID NO: 484 - protein, 4 aa, Artificial Sequence
  pCV8
RAFR

SEQ ID NO: 485 - protein, 39 aa, Artificial Sequence; identical to SEQ ID NO: 115
  pCV8

SEQ ID NO: 486 - protein, 16 aa, Artificial Sequence
  pCV8
LCGIRADCTESAPYAV

SEQ ID NO: 487 - protein, 61 aa, Artificial Sequence; identical to SEQ ID NO: 117
  pCV8

SEQ ID NO: 488 - protein, 7 aa, Artificial Sequence
  pCV8
NDGQCQA

SEQ ID NO: 489 - protein, 13 aa, Artificial Sequence
  pCV8
IEQVWSSPVGMYY

SEQ ID NO: 490 - protein, 5 aa, Artificial Sequence
  pCV8
IGVIC

SEQ ID NO: 491 - protein, 6 aa, Artificial Sequence
  pCV8
MSSRWT

SEQ ID NO: 492 - protein, 22 aa, Artificial Sequence
  pCV8
ERELTTIYALERSFLILCRSTL

SEQ ID NO: 493 - protein, 23 aa, Artificial Sequence
  pCV8
NQRALLECYCRYMRRNDQKSCIC

SEQ ID NO: 494 - protein, 9 aa, Artificial Sequence
  pCV8
RIGRSDRNA

SEQ ID NO: 495 - protein, 10 aa, Artificial Sequence
  pCV8
LLNGGIHRKY

SEQ ID NO: 496 - protein, 7 aa, Artificial Sequence
  pCV8
LGSLLPR

SEQ ID NO: 497 - protein, 14 aa, Artificial Sequence
  pCV8
WSTSSHPPCNACGY

SEQ ID NO: 498 - protein, 30 aa, Artificial Sequence; identical to SEQ ID NO: 128
  pCV8

SEQ ID NO: 499 - protein, 8 aa, Artificial Sequence
  pCV8
KRHNFGLC

SEQ ID NO: 500 - protein, 41 aa, Artificial Sequence; identical to SEQ ID NO: 130
  pCV8

SEQ ID NO: 501 - protein, 15 aa, Artificial Sequence
  pCV8
FRTTVRWRNFRTSLG

SEQ ID NO: 502 - protein, 6 aa, Artificial Sequence
  pCV8
CARCRS

SEQ ID NO: 503 - protein, 11 aa, Artificial Sequence
  pCV8
SSSSRSMCKSS

SEQ ID NO: 504 - protein, 5 aa, Artificial Sequence
  pCV8
SCSGR

SEQ ID NO: 505 - protein, 16 aa, Artificial Sequence
  pCV8
NYSRGLQMEPGTSCCL

SEQ ID NO: 506 - protein, 7 aa, Artificial Sequence
  pCV8
SMERDRI

SEQ ID NO: 507 - protein, 8 aa, Artificial Sequence
  pCV8
FCSSGRFG

SEQ ID NO: 508 - protein, 8 aa, Artificial Sequence
  pCV8
VKTVDISR

SEQ ID NO: 509 - protein, 4 aa, Artificial Sequence
  pCV8
ISRK

SEQ ID NO: 510 - protein, 15 aa, Artificial Sequence
  pCV8
RRIRRKNSSNYPSFS

SEQ ID NO: 511 - protein, 4 aa, Artificial Sequence
  pCV8
LNCN

SEQ ID NO: 512 - protein, 23 aa, Artificial Sequence
  pCV8
TRPNLLLKGLSRIQQRFYCIYFD

SEQ ID NO: 513 - protein, 14 aa, Artificial Sequence
  pCV8
VYTYLDIQDLKYKI

SEQ ID NO: 514 - protein, 40 aa, Artificial Sequence; identical to SEQ ID NO: 144
  pCV8

SEQ ID NO: 515 - protein, 29 aa, Artificial Sequence
  pCV8
VNQLTTKKISRLPLRNRNSLFLHRESRVQ

SEQ ID NO: 516 - protein, 17 aa, Artificial Sequence
  pCV8
KMQARFGERFFLYCNKE

SEQ ID NO: 517 - protein, 6 aa, Artificial Sequence
  pCV8
LSTPSD

SEQ ID NO: 518 - protein, 12 aa, Artificial Sequence
  pCV8
FRVRVPGNPYGN

SEQ ID NO: 519 - protein, 4 aa, Artificial Sequence
  pCV8
KGAI

SEQ ID NO: 520 - protein, 15 aa, Artificial Sequence
  pCV8
VLIFHSLHLQNFLVW

SEQ ID NO: 521 - protein, 18 aa, Artificial Sequence
  pCV8
ILLYGYTTVGAGLVDIGI

SEQ ID NO: 522 - protein, 5 aa, Artificial Sequence
  pCV8
SILYC

SEQ ID NO: 523 - protein, 8 aa, Artificial Sequence
  pCV8
ITSLLLSF

SEQ ID NO: 524 - protein, 34 aa, Artificial Sequence; identical to SEQ ID NO: 154
  pCV8

SEQ ID NO: 525 - protein, 18 aa, Artificial Sequence
  pCV8
QDLQNSAWIHGRQRYYYR

SEQ ID NO: 526 - protein, 26 aa, Artificial Sequence
  pCV8
TTPGTMEPSNRFPIPSLDYVTTICLF

SEQ ID NO: 527 - protein, 32 aa, Artificial Sequence
  pCV8
SEQVFVHNKACFPLALVASNTCLFCACCCLQN

SEQ ID NO: 528 - protein, 19 aa, Artificial Sequence
  pCV8
LGDWRDCDCNGLYCRLDVA

SEQ ID NO: 529 - protein, 42 aa, Artificial Sequence
  pCV8
LLRCFLQAVCSYPLNVVIQPRNKHSSQCASPGDNCDQTAHGK

SEQ ID NO: 530 - protein, 22 aa, Artificial Sequence
  pCV8
TCHWCCDHSWSLANGRTLPRAL

SEQ ID NO: 531 - protein, 27 aa, Artificial Sequence
  pCV8
GPAKRDHCGYITNAFLLQIRSVAACRH

SEQ ID NO: 532 - protein, 14 aa, Artificial Sequence
  pCV8
FRFCCIQPLPYWKL

SEQ ID NO: 533 - protein, 7 aa, Artificial Sequence
  pCV8
IKYRPRR

SEQ ID NO: 534 - protein, 23 aa, Artificial Sequence
  pCV8
QRQYCFASTVRIQAEFQHTGGRY

SEQ ID NO: 535 - protein, 7 aa, Artificial Sequence
  pCV8
WIRALIN

SEQ ID NO: 536 - protein, 6 aa, Artificial Sequence
  pCV8
GFSANI

SEQ ID NO: 537 - protein, 35 aa, Artificial Sequence; identical to SEQ ID NO: 206
  pCV8

SEQ ID NO: 538 - protein, 11 aa, Artificial Sequence
  pCV8
RRDLVSFLALS

SEQ ID NO: 539 - protein, 21 aa, Artificial Sequence
  pCV8
LVKCRVGTNSPNLRPTIGFVM

SEQ ID NO: 540 - protein, 8 aa, Artificial Sequence
  pCV8
IGICSFPL

SEQ ID NO: 541 - protein, 37 aa, Artificial Sequence; identical to SEQ ID NO: 210
  pCV8

SEQ ID NO: 542 - protein, 12 aa, Artificial Sequence
  pCV8
WYLPPPRSNGNG

SEQ ID NO: 543 - protein, 9 aa, Artificial Sequence
  pCV8
EACGIDVIG

SEQ ID NO: 544 - protein, 11 aa, Artificial Sequence
  pCV8
GWLYCWWRTPG

SEQ ID NO: 545 - protein, 275 aa, Artificial Sequence; identical to SEQ ID NO: 214
  pCV8

SEQ ID NO: 546 - protein, 13 aa, Artificial Sequence
  pCV8
LETKWIKLDRKKV

SEQ ID NO: 547 - protein, 23 aa, Artificial Sequence
  pCV8
IKKKRNRKIKNQLRKCSNSSFFF

SEQ ID NO: 548 - protein, 9 aa, Artificial Sequence
  pCV8
LIAIKLVSI

SEQ ID NO: 549 - protein, 10 aa, Artificial Sequence
  pCV8
KKIEPSLNRF

SEQ ID NO: 550 - protein, 5 aa, Artificial Sequence
  pCV8
YDHET

SEQ ID NO: 551 - protein, 18 aa, Artificial Sequence
  pCV8
QIGIPLFYIFRRYKGIIQ

SEQ ID NO: 552 - protein, 4 aa, Artificial Sequence
  pCV8
INTI

SEQ ID NO: 553 - protein, 5 aa, Artificial Sequence
  pCV8
KLDDP

SEQ ID NO: 554 - protein, 35 aa, Artificial Sequence; identical to SEQ ID NO: 223
  pCV8

SEQ ID NO: 555 - protein, 11 aa, Artificial Sequence
  pCV8
NRTLIYYLFFY

SEQ ID NO: 556 - protein, 9 aa, Artificial Sequence
  pCV8
ILDLLVIRY

SEQ ID NO: 557 - protein, 40 aa, Artificial Sequence; identical to SEQ ID NO: 226
  pCV8

SEQ ID NO: 558 - protein, 8 aa, Artificial Sequence
  pCV8
RGFQHINI

SEQ ID NO: 559 - protein, 16 aa, Artificial Sequence
  pCV8
SVPPDSELFFNTHNPY

SEQ ID NO: 560 - protein, 12 aa, Artificial Sequence
  pCV8
LIILVIGFLCLV

SEQ ID NO: 561 - protein, 7 aa, Artificial Sequence
  pCV8
EIRYSNK

SEQ ID NO: 562 - protein, 4 aa, Artificial Sequence
  pCV8
FYSE

SEQ ID NO: 563 - protein, 36 aa, Artificial Sequence; identical to SEQ ID NO: 232
  pCV8

SEQ ID NO: 564 - protein, 20 aa, Artificial Sequence
  pCV8
INQWAVLVLLKIPMKIQIEK

SEQ ID NO: 565 - protein, 35 aa, Artificial Sequence; identical to SEQ ID NO: 234
  pCV8

SEQ ID NO: 566 - protein, 28 aa, Artificial Sequence
  pCV8
LVIGMETVIPSILILKIIFLRLTTIILF

SEQ ID NO: 567 - protein, 52 aa, Artificial Sequence; identical to SEQ ID NO: 236
  pCV8

SEQ ID NO: 568 - protein, 4 aa, Artificial Sequence
  pCV8
ILPL

SEQ ID NO: 569 - protein, 39 aa, Artificial Sequence; identical to SEQ ID NO: 238
  pCV8

SEQ ID NO: 570 - protein, 8 aa, Artificial Sequence
  pCV8
EKVLMISR

SEQ ID NO: 571 - protein, 16 aa, Artificial Sequence
  pCV8
LKNTGICGFNAKIVMD

SEQ ID NO: 572 - protein, 5 aa, Artificial Sequence
  pCV8
IIRNF

SEQ ID NO: 573 - protein, 9 aa, Artificial Sequence
  pCV8
IFVNNVDII

SEQ ID NO: 574 - protein, 34 aa, Artificial Sequence; identical to SEQ ID NO: 243
  pCV8

SEQ ID NO: 575 - protein, 54 aa, Artificial Sequence; identical to SEQ ID NO: 244
  pCV8

SEQ ID NO: 576 - protein, 28 aa, Artificial Sequence
  pCV8
LAALGRSAAASGISSLKGGNTVIHRIRG

SEQ ID NO: 577 - protein, 16 aa, Artificial Sequence
  pCV8
RRKEHVSKRPAKGQEP

SEQ ID NO: 578 - protein, 9 aa, Artificial Sequence
  pCV8
KGRVAGVFP

SEQ ID NO: 579 - protein, 4 aa, Artificial Sequence
  pCV8
APPP

SEQ ID NO: 580 - protein, 57 aa, Artificial Sequence; identical to SEQ ID NO: 249
  pCV8

SEQ ID NO: 581 - protein, 29 aa, Artificial Sequence
  pCV8
VSQFGVGRSLQAGLCARTPRSARPLRLIR

SEQ ID NO: 582 - protein, 16 aa, Artificial Sequence
  pCV8
VQPGKTRLIATGSSHW

SEQ ID NO: 583 - protein, 16 aa, Artificial Sequence
  pCV8
QSEVCRRCYRVLEVVA

SEQ ID NO: 584 - protein, 4 aa, Artificial Sequence
  pCV8
LRLH

SEQ ID NO: 585 - protein, 20 aa, Artificial Sequence
  pCV8
KDSIWYLRSAEASYLRKKSW

SEQ ID NO: 586 - protein, 10 aa, Artificial Sequence
  pCV8
LLIRQTNHRW

SEQ ID NO: 587 - protein, 28 aa, Artificial Sequence
  pCV8
RWFFCLQAADYAQKKRISRRSFDLFYGV

SEQ ID NO: 588 - protein, 32 aa, Artificial Sequence; identical to SEQ ID NO: 257
  pCV8

SEQ ID NO: 589 - protein, 6 aa, Artificial Sequence
  pCV8
INLKYI

SEQ ID NO: 590 - protein, 4 aa, Artificial Sequence
  pCV8
VNLV

SEQ ID NO: 591 - protein, 7 aa, Artificial Sequence
  pCV8
QLPMLNQ

SEQ ID NO: 592 - protein, 75 aa, Artificial Sequence; identical to SEQ ID NO: 261
  pCV8

SEQ ID NO: 593 - protein, 5 aa, Artificial Sequence
  pCV8
LLPGS

SEQ ID NO: 594 - protein, 44 aa, Artificial Sequence; identical to SEQ ID NO: 263
  pCV8

SEQ ID NO: 595 - protein, 10 aa, Artificial Sequence
  pCV8
LLRSSDRCQK

SEQ ID NO: 596 - protein, 14 aa, Artificial Sequence
  pCV8
VGRSVITHGYGSTA

SEQ ID NO: 597 - protein, 15 aa, Artificial Sequence
  pCV8
FSYCHAIRKMLFCDW

SEQ ID NO: 598 - protein, 24 aa, Artificial Sequence
  pCV8
VLNQVILRIVYAATELLLPGVNTG

SEQ ID NO: 599 - protein, 4 aa, Artificial Sequence
  pCV8
YRAT

SEQ ID NO: 600 - protein, 95 aa, Artificial Sequence; identical to SEQ ID NO: 269
  pCV8

SEQ ID NO: 601 - protein, 5 aa, Artificial Sequence
  pCV8
MYLEK

SEQ ID NO: 602 - protein, 14 aa, Artificial Sequence
  pCV8
TNRGSAHISPKSAT

SEQ ID NO: 603 - protein, 12 aa, Artificial Sequence
  pCV8
RLRNHYYHDINL

SEQ ID NO: 604 - protein, 7 aa, Artificial Sequence
  pCV8
AYHEALS

SEQ ID NO: 605 - DNA, 8082 bp, Artificial Sequence; identical to SEQ ID NO: 378
  pCV8
  CDS (3)..(8081)

SEQ ID NO: 606 - protein, 10 aa, Artificial Sequence
  pCV8
ARFGDDGENL

SEQ ID NO: 607 - protein, 12 aa, Artificial Sequence
  pCV8
HMQLPETVTACL

SEQ ID NO: 608 - protein, 430 aa, Artificial Sequence; identical to SEQ ID NO: 277
  pCV8

SEQ ID NO: 609 - protein, 12 aa, Artificial Sequence
  pCV8
TLADKLAGNKEG

SEQ ID NO: 610 - protein, 13 aa, Artificial Sequence
  pCV8
GERTQVIILRSLN

SEQ ID NO: 611 - protein, 10 aa, Artificial Sequence
  pCV8
IAIKLGPIFY

SEQ ID NO: 612 - protein, 18 aa, Artificial Sequence
  pCV8
AEYNKDSIAYILTKYILT

SEQ ID NO: 613 - protein, 4 aa, Artificial Sequence
  pCV8
IYKI

SEQ ID NO: 614 - protein, 36 aa, Artificial Sequence; identical to SEQ ID NO: 283
  pCV8

SEQ ID NO: 615 - protein, 10 aa, Artificial Sequence
  pCV8
NVLCTIINSK

SEQ ID NO: 616 - protein, 73 aa, Artificial Sequence; identical to SEQ ID NO: 285
  pCV8

SEQ ID NO: 617 - protein, 39 aa, Artificial Sequence; identical to SEQ ID NO: 286
  pCV8

SEQ ID NO: 618 - protein, 8 aa, Artificial Sequence
  pCV8
QAFYYLSS

SEQ ID NO: 619 - protein, 9 aa, Artificial Sequence
  pCV8
YVCLGVLAI

SEQ ID NO: 620 - protein, 254 aa, Artificial Sequence
  pCV8
INQDLTMAARGSHHHHHGPRGPASRICRIRLGSMADNGTITVEELKQLLEQWNLVIGFLFLAWIMLLQFAYSNRNRFLYIIKLVFLWLLWPVTLACFVLAVVYRINWVTGGIAIAMACIVGLMWLSYFVASFRLFARTRSMWSFNPETNILLNVPLRGTIVTRPLMESELVIGAVIIRGHLRMAGHSLGRCDIKDLPKEITVATSRTLSYYKLGASQRVGTDSGFAAYNRYRIGNYKLNTDHAGSNDNIALLVQ

SEQ ID NO: 621 - protein, 18 aa, Artificial Sequence
  pCV8
EFKPNSSTLAAVTSGSEL

SEQ ID NO: 622 - protein, 12 aa, Artificial Sequence
  pCV8
LIKAFLLTYSNF

SEQ ID NO: 623 - protein, 4 aa, Artificial Sequence
  pCV8
RKES

SEQ ID NO: 624 - protein, 6 aa, Artificial Sequence
  pCV8
KYPISC

SEQ ID NO: 625 - protein, 24 aa, Artificial Sequence
  pCV8
SKILGISFFFILNLSILNSVNDEI

SEQ ID NO: 626 - protein, 9 aa, Artificial Sequence
  pCV8
YPFLHFHNS

SEQ ID NO: 627 - protein, 14 aa, Artificial Sequence
  pCV8
NAELVRIPPICDLP

SEQ ID NO: 628 - protein, 5 aa, Artificial Sequence
  pCV8
DLLCK

SEQ ID NO: 629 - protein, 20 aa, Artificial Sequence
  pCV8
VYVPFHYESRLYGQPLRVEC

SEQ ID NO: 630 - protein, 15 aa, Artificial Sequence
  pCV8
MPGTTLLLFLSPPSY

SEQ ID NO: 631 - protein, 28 aa, Artificial Sequence
  pCV8
AFLFLPINDGTSPRHDRTGMDKRLVGLT

SEQ ID NO: 632 - protein, 42 aa, Artificial Sequence; identical to SEQ ID NO: 301
  pCV8

SEQ ID NO: 633 - protein, 25 aa, Artificial Sequence
  pCV8
LASSSAISNRRCWPYICTAPQWMAA

SEQ ID NO: 634 - protein, 11 aa, Artificial Sequence
  pCV8
SHTVILICWLR

SEQ ID NO: 635 - protein, 9 aa, Artificial Sequence
  pCV8
GLMKQRGEL

SEQ ID NO: 636 - protein, 19 aa, Artificial Sequence
  pCV8
STTFWKLRLPLERARFSAL

SEQ ID NO: 637 - protein, 48 aa, Artificial Sequence; identical to SEQ ID NO: 306
  pCV8

SEQ ID NO: 638 - protein, 10 aa, Artificial Sequence
  pCV8
QKQENIALPW

SEQ ID NO: 639 - protein, 19 aa, Artificial Sequence
  pCV8
VQRRRNSLIRFLNRIYLRR

SEQ ID NO: 640 - protein, 15 aa, Artificial Sequence
  pCV8
RYGTRRPTGLAMSEM

SEQ ID NO: 641 - protein, 11 aa, Artificial Sequence
  pCV8
CLRCPAFGTAQ

SEQ ID NO: 642 - protein, 54 aa, Artificial Sequence; identical to SEQ ID NO: 311
  pCV8

SEQ ID NO: 643 - protein, 6 aa, Artificial Sequence
  pCV8
KARSLR

SEQ ID NO: 644 - protein, 9 aa, Artificial Sequence
  pCV8
LANNSRLSG

SEQ ID NO: 645 - protein, 6 aa, Artificial Sequence
  pCV8
IEKRSK

SEQ ID NO: 646 - protein, 23 aa, Artificial Sequence
  pCV8
KRREIERSKISYENAVILLFSSN

SEQ ID NO: 647 - protein, 15 aa, Artificial Sequence
  pCV8
LQLNSSQSEKRLSRV

SEQ ID NO: 648 - protein, 25 aa, Artificial Sequence
  pCV8
IDFDTIMRLDKSGFLYSIYLEDIKV

SEQ ID NO: 649 - protein, 18 aa, Artificial Sequence
  pCV8
IQSRSSMILRIGIFFSIL

SEQ ID NO: 650 - protein, 30 aa, Artificial Sequence; identical to SEQ ID NO: 319
  pCV8

SEQ ID NO: 651 - protein, 9 aa, Artificial Sequence
  pCV8
FITYFFIKF

SEQ ID NO: 652 - protein, 30 aa, Artificial Sequence; identical to SEQ ID NO: 321
  pCV8

SEQ ID NO: 653 - protein, 9 aa, Artificial Sequence
  pCV8
HDIGEAALY

SEQ ID NO: 654 - protein, 6 aa, Artificial Sequence
  pCV8
KLYYFK

SEQ ID NO: 655 - protein, 29 aa, Artificial Sequence
  pCV8
YKGGSNILIYSEVFPQIQNFFSILTILIS

SEQ ID NO: 656 - protein, 5 aa, Artificial Sequence
  pCV8
LDFYA

SEQ ID NO: 657 - protein, 4 aa, Artificial Sequence
  pCV8
SDRK

SEQ ID NO: 658 - protein, 20 aa, Artificial Sequence
  pCV8
DIQINNFIANDYSSIVFSCK

SEQ ID NO: 659 - protein, 11 aa, Artificial Sequence
  pCV8
GARKLYGKMVV

SEQ ID NO: 660 - protein, 4 aa, Artificial Sequence
  pCV8
FDVV

SEQ ID NO: 661 - protein, 10 aa, Artificial Sequence
  pCV8
EGVRTQVWAK

SEQ ID NO: 662 - protein, 8 aa, Artificial Sequence
  pCV8
INGQSWSY

SEQ ID NO: 663 - protein, 10 aa, Artificial Sequence
  pCV8
RSKSKSEKHS

SEQ ID NO: 664 - protein, 4 aa, Artificial Sequence
  pCV8
LEES

SEQ ID NO: 665 - protein, 5 aa, Artificial Sequence
  pCV8
LFIRR

SEQ ID NO: 666 - protein, 7 aa, Artificial Sequence
  pCV8
RHSEFHL

SEQ ID NO: 667 - protein, 4 aa, Artificial Sequence
  pCV8
HFFS

SEQ ID NO: 668 - protein, 9 aa, Artificial Sequence
  pCV8
EWRQLFHLF

SEQ ID NO: 669 - protein, 4 aa, Artificial Sequence
  pCV8
KSYF

SEQ ID NO: 670 - protein, 7 aa, Artificial Sequence
  pCV8
QRSFFSE

SEQ ID NO: 671 - protein, 6 aa, Artificial Sequence
  pCV8
TRKFFL

SEQ ID NO: 672 - protein, 8 aa, Artificial Sequence
  pCV8
LSKLELSE

SEQ ID NO: 673 - protein, 6 aa, Artificial Sequence
  pCV8
GRRSLL

SEQ ID NO: 674 - protein, 4 aa, Artificial Sequence
  pCV8
FLHV

SEQ ID NO: 675 - protein, 15 aa, Artificial Sequence
  pCV8
LSSVSNLYRYFHYKW

SEQ ID NO: 676 - protein, 4 aa, Artificial Sequence
  pCV8
QLHL

SEQ ID NO: 677 - protein, 5 aa, Artificial Sequence
  pCV8
GRLWW

SEQ ID NO: 678 - protein, 5 aa, Artificial Sequence
  pCV8
KRGFQ

SEQ ID NO: 679 - protein, 7 aa, Artificial Sequence
  pCV8
TNSHEGQ

SEQ ID NO: 680 - protein, 7 aa, Artificial Sequence
  pCV8
FNYKRKF

SEQ ID NO: 681 - protein, 22 aa, Artificial Sequence
  pCV8
SRGNSKIQAFVGSMRKLLWIKL

SEQ ID NO: 682 - protein, 10 aa, Artificial Sequence
  pCV8
EIFEIKNEYL

SEQ ID NO: 683 - protein, 9 aa, Artificial Sequence
  pCV8
TMWISFENE

SEQ ID NO: 684 - protein, 4 aa, Artificial Sequence
  pCV8
LFPV

SEQ ID NO: 685 - protein, 23 aa, Artificial Sequence
  pCV8
NCYPLTIPHNIRAGSIKCKAWGA

SEQ ID NO: 686 - protein, 22 aa, Artificial Sequence
  pCV8
LTLIALRSLPAFQSGNLSCQLH

SEQ ID NO: 687 - protein, 56 aa, Artificial Sequence; identical to SEQ ID NO: 356
  pCV8

SEQ ID NO: 688 - protein, 44 aa, Artificial Sequence; identical to SEQ ID NO: 357
  pCV8

SEQ ID NO: 689 - protein, 48 aa, Artificial Sequence; identical to SEQ ID NO: 358
  pCV8

SEQ ID NO: 690 - protein, 92 aa, Artificial Sequence; identical to SEQ ID NO: 359
  pCV8

SEQ ID NO: 691 - protein, 46 aa, Artificial Sequence; identical to SEQ ID NO: 360
  pCV8

SEQ ID NO: 692 - protein, 13 aa, Artificial Sequence
  pCV8
GILVMRLSKRIFT

SEQ ID NO: 693 - protein, 4 aa, Artificial Sequence
  pCV8
ILLN

SEQ ID NO: 694 - protein, 5 aa, Artificial Sequence
  pCV8
SFKSI

SEQ ID NO: 695 - protein, 4 aa, Artificial Sequence
  pCV8
SIYE

SEQ ID NO: 696 - protein, 27 aa, Artificial Sequence
  pCV8
TWSDSYQCLISEAPISAICLFRSSIVA

SEQ ID NO: 697 - protein, 4 aa, Artificial Sequence
  pCV8
LPVV

SEQ ID NO: 698 - protein, 103 aa, Artificial Sequence; identical to SEQ ID NO: 367
  pCV8

SEQ ID NO: 699 - protein, 58 aa, Artificial Sequence; identical to SEQ ID NO: 368
  pCV8

SEQ ID NO: 700 - protein, 50 aa, Artificial Sequence; identical to SEQ ID NO: 369
  pCV8

SEQ ID NO: 701 - protein, 6 aa, Artificial Sequence
  pCV8
PTRAPN

SEQ ID NO: 702 - protein, 12 aa, Artificial Sequence
  pCV8
SSASFTFTSVSG

SEQ ID NO: 703 - protein, 19 aa, Artificial Sequence
  pCV8
AKTGRQNAAKKGIRATRKC

SEQ ID NO: 704 - protein, 10 aa, Artificial Sequence
  pCV8
ILILFLFQYY

SEQ ID NO: 705 - protein, 17 aa, Artificial Sequence
  pCV8
SIYQGYCLMSGYIFECI

SEQ ID NO: 706 - protein, 19 aa, Artificial Sequence
  pCV8
KNKQIGVPRTFPRKVPPDV

SEQ ID NO: 707 - protein, 20 aa, Artificial Sequence
  pCV8
ETIIIMTLTYKNRRITRPFR

SEQ ID NO: 708 - DNA, 29740 bp, SARS-CoV Virus
atattaggtttttacctacccaggaaaagccaaccaacctcgatctcttgtagatctgttctctaaacgaactttaaaatctgtgtagctgtcgctcggctgcatgcctagtgcacctacgcagtataaacaataataaattttactgtcgttgacaagaaacgagtaactcgtccctcttctgcagactgcttacggtttcgtccgtgttgcagtcgatcatcagcatacctaggtttcgtccgggtgtgaccgaaaggtaagatggagagccttgttcttggtgtcaacgagaaaacacacgtccaactcagtttgcctgtccttcaggttagagacgtgctagtgcgtggcttcggggactctgtggaagaggccctatcggaggcacgtgaacacctcaaaaatggcacttgtggtctagtagagctggaaaaaggcgtactgccccagcttgaacagccctatgtgttcattaaacgttctgatgccttaagcaccaatcacggccacaaggtcgttgagctggttgcagaaatggacggcattcagtacggtcgtagcggtataacactgggagtactcgtgccacatgtgggcgaaaccccaattgcataccgcaatgttcttcttcgtaagaacggtaataagggagccggtggtcatagctatggcatcgatctaaagtcttatgacttaggtgacgagcttggcactgatcccattgaagattatgaacaaaactggaacactaagcatggcagtggtgcactccgtgaactcactcgtgagctcaatggaggtgcagtcactcgctatgtcgacaacaatttctgtggcccagatgggtaccctcttgattgcatcaaagattttctcgcacgcgcgggcaagtcaatgtgcactctttccgaacaacttgattacatcgagtcgaagagaggtgtctactgctgccgtgaccatgagcatgaaattgcctggttcactgagcgctctgataagagctacgagcaccagacacccttcgaaattaagagtgccaagaaatttgacactttcaaaggggaatgcccaaagtttgtgtttcctcttaactcaaaagtcaaagtcattcaaccacgtgttgaaaagaaaaagactgagggtttcatggggcgtatacgctctgtgtaccctgttgcatctccacaggagtgtaacaatatgcacttgtctaccttgatgaaatgtaatcattgcgatgaagtttcatggcagacgtgcgactttctgaaagccacttgtgaacattgtggcactgaaaatttagttattgaaggacctactacatgtgggtacctacctactaatgctgtagtgaaaatgccatgtcctgcctgtcaagacccagagattggacctgagcatagtgttgcagattatcacaaccactcaaacattgaaactcgactccgcaagggaggtaggactagatgttttggaggctgtgtgtttgcctatgttggctgctataataagcgtgcctactgggttcctcgtgctagtgctgatattggctcaggccatactggcattactggtgacaatgtggagaccttgaatgaggatctccttgagatactgagtcgtgaacgtgttaacattaacattgttggcgattttcatttgaatgaagaggttgccatcattttggcatctttctctgcttctacaagtgcctttattgacactataaagagtcttgattacaagtctttcaaaaccattgttgagtcctgcggtaactataaagttaccaagggaaagcccgtaaaaggtgcttggaacattggacaacagagatcagttttaacaccactgtgtggttttccctcacaggctgctggtgttatcagatcaatttttgcgcgcacacttgatgcagcaaaccactcaattcctgatttgcaaagagcagctgtcaccatacttgatggtatttctgaacagtcattacgtcttgtcgacgccatggtttatacttcagacctgctcaccaacagtgtcattattatggcatatgtaactggtggtcttgtacaacagacttctcagtggttgtctaatcttttgggcactactgttgaaaaactcaggcctatctttgaatggattgaggcgaaacttagtgcaggagttgaatttctcaaggatgcttgggagattctcaaatttctcattacaggtgtttttgacatcgtcaagggtcaaatacaggttgcttcagataacatcaaggattgtgtaaaatgcttcattgatgttgttaacaaggcactcgaaatgtgcattgatcaagtcactatcgctggcgcaaagttgcgatcactcaacttaggtgaagtcttcatcgctcaaagcaagggactttaccgtcagtgtatacgtggcaaggagcagctgcaactactcatgcctcttaaggcaccaaaagaagtaacctttcttgaaggtgattcacatgacacagtacttacctctgaggaggttgttctcaagaacggtgaactcgaagcactcgagacgcccgttgatagcttcacaaatggagctatcgtcggcacaccagtctgtgtaaatggcctcatgctcttagagattaaggacaaagaacaatactgcgcattgtctcctggtttactggctacaaacaatgtctttcgcttaaaagggggtgcaccaattaaaggtgtaacctttggagaagatactgtttgggaagttcaaggttacaagaatgtgagaatcacatttgagcttgatgaacgtgttgacaaagtgcttaatgaaaagtgctctgtctacactgttgaatccggtaccgaagttactgagtttgcatgtgttgtagcagaggctgttgtgaagactttacaaccagtttctgatctccttaccaacatgggtattgatcttgatgagtggagtgtagctacattctacttatttgatgatgctggtgaagaaaacttttcatcacgtatgtattgttccttttaccctccagatgaggaagaagaggacgatgcagagtgtgaggaagaagaaattgatgaaacctgtgaacatgagtacggtacagaggatgattatcaaggtctccctctggaatttggtgcctcagctgaaacagttcgagttgaggaagaagaagaggaagactggctggatgatactactgagcaatcagagattgagccagaaccagaacctacacctgaagaaccagttaatcagtttactggttatttaaaacttactgacaatgttgccattaaatgtgttgacatcgttaaggaggcacaaagtgctaatcctatggtgattgtaaatgctgctaacatacacctgaaacatggtggtggtgtagcaggtgcactcaacaaggcaaccaatggtgccatgcaaaaggagagtgatgattacattaagctaaatggccctcttacagtaggagggtcttgtttgctttctggacataatcttgctaagaagtgtctgcatgttgttggacctaacctaaatgcaggtgaggacatccagcttcttaaggcagcatatgaaaatttcaattcacaggacatcttacttgcaccattgttgtcagcaggcatatttggtgctaaaccacttcagtctttacaagtgtgcgtgcagacggttcgtacacaggtttatattgcagtcaatgacaaagctctttatgagcaggttgtcatggattatcttgataacctgaagcctagagtggaagcacctaaacaagaggagccaccaaacacagaagattccaaaactgaggagaaatctgtcgtacagaagcctgtcgatgtgaagccaaaaattaaggcctgcattgatgaggttaccacaacactggaagaaactaagtttcttaccaataagttactcttgtttgctgatatcaatggtaagctttaccatgattctcagaacatgcttagaggtgaagatatgtctttccttgagaaggatgcaccttacatggtaggtgatgttatcactagtggtgatatcacttgtgttgtaataccctccaaaaaggctggtggcactactgagatgctctcaagagctttgaagaaagtgccagttgatgagtatataaccacgtaccctggacaaggatgtgctggttatacacttgaggaagctaagactgctcttaagaaatgcaaatctgcattttatgtactaccttcagaagcacctaatgctaaggaagagattctaggaactgtatcctggaatttgagagaaatgcttgctcatgctgaagagacaagaaaattaatgcctatatgcatggatgttagagccataatggcaaccatccaacgtaagtataaaggaattaaaattcaagagggcatcgttgactatggtgtccgattcttcttttatactagtaaagagcctgtagcttctattattacgaagctgaactctctaaatgagccgcttgtcacaatgccaattggttatgtgacacatggttttaatcttgaagaggctgcgcgctgtatgcgttctcttaaagctcctgccgtagtgtcagtatcatcaccagatgctgttactacatataatggatacctcacttcgtcatcaaagacatctgaggagcactttgtagaaacagtttctttggctggctcttacagagattggtcctattcaggacagcgtacagagttaggtgttgaatttcttaagcgtggtgacaaaattgtgtaccacactctggagagccccgtcgagtttcatcttgacggtgaggttctttcacttgacaaactaaagagtctcttatccctgcgggaggttaagactataaaagtgttcacaactgtggacaacactaatctccacacacagcttgtggatatgtctatgacatatggacagcagtttggtccaacatacttggatggtgctgatgttacaaaaattaaacctcatgtaaatcatgagggtaagactttctttgtactacctagtgatgacacactacgtagtgaagctttcgagtactaccatactcttgatgagagttttcttggtaggtacatgtctgctttaaaccacacaaagaaatggaaatttcctcaagttggtggtttaacttcaattaaatgggctgataacaattgttatttgtctagtgttttattagcacttcaacagcttgaagtcaaattcaatgcaccagcacttcaagaggcttattatagagcccgtgctggtgatgctgctaacttttgtgcactcatactcgcttacagtaataaaactgttggcgagcttggtgatgtcagagaaactatgacccatcttctacagcatgctaatttggaatctgcaaagcgagttcttaatgtggtgtgtaaacattgtggtcagaaaactactaccttaacgggtgtagaagctgtgatgtatatgggtactctatcttatgataatcttaagacaggtgtttccattccatgtgtgtgtggtcgtgatgctacacaatatctagtacaacaagagtcttcttttgttatgatgtctgcaccacctgctgagtataaattacagcaaggtacattcttatgtgcgaatgagtacactggtaactatcagtgtggtcattacactcatataactgctaaggagaccctctatcgtattgacggagctcaccttacaaagatgtcagagtacaaaggaccagtgactgatgttttctacaaggaaacatcttacactacaaccatcaagcctgtgtcgtataaactcgatggagttacttacacagagattgaaccaaaattggatgggtattataaaaaggataatgcttactatacagagcagcctatagaccttgtaccaactcaaccattaccaaatgcgagttttgataatttcaaactcacatgttctaacacaaaatttgctgatgatttaaatcaaatgacaggcttcacaaagccagcttcacgagagctatctgtcacattcttcccagacttgaatggcgatgtagtggctattgactatagacactattcagcgagtttcaagaaaggtgctaaattactgcataagccaattgtttggcacattaaccaggctacaaccaagacaacgttcaaaccaaacacttggtgtttacgttgtctttggagtacaaagccagtagatacttcaaattcatttgaagttctggcagtagaagacacacaaggaatggacaatcttgcttgtgaaagtcaacaacccacctctgaagaagtagtggaaaatcctaccatacagaaggaagtcatagagtgtgacgtgaaaactaccgaagttgtaggcaatgtcatacttaaaccatcagatgaaggtgttaaagtaacacaagagttaggtcatgaggatcttatggctgcttatgtggaaaacacaagcattaccattaagaaacctaatgagctttcactagccttaggtttaaaaacaattgccactcatggtattgctgcaattaatagtgttccttggagtaaaattttggcttatgtcaaaccattcttaggacaagcagcaattacaacatcaaattgcgctaagagattagcacaacgtgtgtttaacaattatatgccttatgtgtttacattattgttccaattgtgtacttttactaaaagtaccaattctagaattagagcttcactacctacaactattgctaaaaatagtgttaagagtgttgctaaattatgtttggatgccggcattaattatgtgaagtcacccaaattttctaaattgttcacaatcgctatgtggctattgttgttaagtatttgcttaggttctctaatctgtgtaactgctgcttttggtgtactcttatctaattttggtgctccttcttattgtaatggcgttagagaattgtatcttaattcgtctaacgttactactatggatttctgtgaaggttcttttccttgcagcatttgtttaagtggattagactcccttgattcttatccagctcttgaaaccattcaggtgacgatttcatcgtacaagctagacttgacaattttaggtctggccgctgagtgggttttggcatatatgttgttcacaaaattcttttatttattaggtctttcagctataatgcaggtgttctttggctattttgctagtcatttcatcagcaattcttggctcatgtggtttatcattagtattgtacaaatggcacccgtttctgcaatggttaggatgtacatcttctttgcttctttctactacatatggaagagctatgttcatatcatggatggttgcacctcttcgacttgcatgatgtgctataagcgcaatcgtgccacacgcgttgagtgtacaactattgttaatggcatgaagagatctttctatgtctatgcaaatggaggccgtggcttctgcaagactcacaattggaattgtctcaattgtgacacattttgcactggtagtacattcattagtgatgaagttgctcgtgatttgtcactccagtttaaaagaccaatcaaccctactgaccagtcatcgtatattgttgatagtgttgctgtgaaaaatggcgcgcttcacctctactttgacaaggctggtcaaaagacctatgagagacatccgctctcccattttgtcaatttagacaatttgagagctaacaacactaaaggttcactgcctattaatgtcatagtttttgatggcaagtccaaatgcgacgagtctgcttctaagtctgcttctgtgtactacagtcagctgatgtgccaacctattctgttgcttgaccaagctcttgtatcaaacgttggagatagtactgaagtttccgttaagatgtttgatgcttatgtcgacaccttttcagcaacttttagtgttcctatggaaaaacttaaggcacttgttgctacagctcacagcgagttagcaaagggtgtagctttagatggtgtcctttctacattcgtgtcagctgcccgacaaggtgttgttgataccgatgttgacacaaaggatgttattgaatgtctcaaactttcacatcactctgacttagaagtgacaggtgacagttgtaacaatttcatgctcacctataataaggttgaaaacatgacgcccagagatcttggcgcatgtattgactgtaatgcaaggcatatcaatgcccaagtagcaaaaagtcacaatgtttcactcatctggaatgtaaaagactacatgtctttatctgaacagctgcgtaaacaaattcgtactgctgccaagaagaacaacataccttttacactaacttgtgctacaactagacaggttgtcaatgtcataactactaaaatctcactcaagggtggtaagattgttagtacttgttttaaacttatgcttaaggccacattattgtgcgttcttgctgcattggtttgttatatcgttatgccagtacatacattgtcaatccatgatggttacacaaatgaaatcattggttacaaagccattcaggatggtgtcactcgtgacatcatttctactgatgattgttttgcaaataaacatgctggttttgacgcatggtttagccagcgtggtggttcatacaaaaatgacaaaagctgccctgtagtagctgctatcattacaagagagattggtttcatagtgcctggcttaccgggtactgtgctgagagcaatcaatggtgacttcttgcattttctacctcgtgtttttagtgctgttggcaacatttgctacacaccttccaaactcattgagtatagtgattttgctacctctgcttgcgttcttgctgctgagtgtacaatttttaaggatgctatgggcaaacctgtgccatattgttatgacactaatttgctagagggttctatttcttatagtgagcttcgtccagacactcgttatgtgcttatggatggttccatcatacagtttcctaacacttacctggagggttctgttagagtagtaacaacttttgatgctgagtactgtagacatggtacatgcgaaaggtcagaagtaggtatttgcctatctaccagtggtagatgggttcttaataatgagcattacagagctctatcaggagttttctgtggtgttgatgcgatgaatctcatagctaacatctttactcctcttgtgcaacctgtgggtgctttagatgtgtctgcttcagtagtggctggtggtattattgccatattggtgacttgtgctgcctactactttatgaaattcagacgtgtttttggtgagtacaaccatgttgttgctgctaatgcacttttgtttttgatgtctttcactatactctgtctggtaccagcttacagctttctgccgggagtctactcagtcttttacttgtacttgacattctatttcaccaatgatgtttcattcttggctcaccttcaatggtttgccatgttttctcctattgtgcctttttggataacagcaatctatgtattctgtatttctctgaagcactgccattggttctttaacaactatcttaggaaaagagtcatgtttaatggagttacatttagtaccttcgaggaggctgctttgtgtacctttttgctcaacaaggaaatgtacctaaaattgcgtagcgagacactgttgccacttacacagtataacaggtatcttgctctatataacaagtacaagtatttcagtggagccttagatactaccagctatcgtgaagcagcttgctgccacttagcaaaggctctaaatgactttagcaactcaggtgctgatgttctctaccaaccaccacagacatcaatcacttctgctgttctgcagagtggttttaggaaaatggcattcccgtcaggcaaagttgaagggtgcatggtacaagtaacctgtggaactacaactcttaatggattgtggttggatgacacagtatactgtccaagacatgtcatttgcacagcagaagacatgcttaatcctaactatgaagatctgctcattcgcaaatccaaccatagctttcttgttcaggctggcaatgttcaacttcgtgttattggccattctatgcaaaattgtctgcttaggcttaaagttgatacttctaaccctaagacacccaagtataaatttgtccgtatccaacctggtcaaacattttcagttctagcatgctacaatggttcaccatctggtgtttatcagtgtgccatgagacctaatcataccattaaaggttctttccttaatggatcatgtggtagtgttggttttaacattgattatgattgcgtgtctttctgctatatgcatcatatggagcttccaacaggagtacacgctggtactgacttagaaggtaaattctatggtccatttgttgacagacaaactgcacaggctgcaggtacagacacaaccataacattaaatgttttggcatggctgtatgctgctgttatcaatggtgataggtggtttcttaatagattcaccactactttgaatgactttaaccttgtggcaatgaagtacaactatgaacctttgacacaagatcatgttgacatattgggacctctttctgctcaaacaggaattgccgtcttagatatgtgtgctgctttgaaagagctgctgcagaatggtatgaatggtcgtactatccttggtagcactattttagaagatgagtttacaccatttgatgttgttagacaatgctctggtgttaccttccaaggtaagttcaagaaaattgttaagggcactcatcattggatgcttttaactttcttgacatcactattgattcttgttcaaagtacacagtggtcactgtttttctttgtttacgagaatgctttcttgccatttactcttggtattatggcaattgctgcatgtgctatgctgcttgttaagcataagcacgcattcttgtgcttgtttctgttaccttctcttgcaacagttgcttactttaatatggtctacatgcctgctagctgggtgatgcgtatcatgacatggcttgaattggctgacactagcttgtctggttataggcttaaggattgtgttatgtatgcttcagctttagttttgcttattctcatgacagctcgcactgtttatgatgatgctgctagacgtgtttggacactgatgaatgtcattacacttgtttacaaagtctactatggtaatgctttagatcaagctatttccatgtgggccttagttatttctgtaacctctaactattctggtgtcgttacgactatcatgtttttagctagagctatagtgtttgtgtgtgttgagtattacccattgttatttattactggcaacaccttacagtgtatcatgcttgtttattgtttcttaggctattgttgctgctgctactttggccttttctgtttactcaaccgttacttcaggcttactcttggtgtttatgactacttggtctctacacaagaatttaggtatatgaactcccaggggcttttgcctcctaagagtagtattgatgctttcaagcttaacattaagttgttgggtattggaggtaaaccatgtatcaaggttgctactgtacagtctaaaatgtctgacgtaaagtgcacatctgtggtactgctctcggttcttcaacaacttagagtagagtcatcttctaaattgtgggcacaatgtgtacaactccacaatgatattcttcttgcaaaagacacaactgaagctttcgagaagatggtttctcttttgtctgttttgctatccatgcagggtgctgtagacattaataggttgtgcgaggaaatgctcgataaccgtgctactcttcaggctattgcttcagaatttagttctttaccatcatatgccgcttatgccactgcccaggaggcctatgagcaggctgtagctaatggtgattctgaagtcgttctcaaaaagttaaagaaatctttgaatgtggctaaatctgagtttgaccgtgatgctgccatgcaacgcaagttggaaaagatggcagatcaggctatgacccaaatgtacaaacaggcaagatctgaggacaagagggcaaaagtaactagtgctatgcaaacaatgctcttcactatgcttaggaagcttgataatgatgcacttaacaacattatcaacaatgcgcgtgatggttgtgttccactcaacatcataccattgactacagcagccaaactcatggttgttgtccctgattatggtacctacaagaacacttgtgatggtaacacctttacatatgcatctgcactctgggaaatccagcaagttgttgatgcggatagcaagattgttcaacttagtgaaattaacatggacaattcaccaaatttggcttggcctcttattgttacagctctaagagccaactcagctgttaaactacagaataatgaactgagtccagtagcactacgacagatgtcctgtgcggctggtaccacacaaacagcttgtactgatgacaatgcacttgcctactataacaattcgaagggaggtaggtttgtgctggcattactatcagaccaccaagatctcaaatgggctagattccctaagagtgatggtacaggtacaatttacacagaactggaaccaccttgtaggtttgttacagacacaccaaaagggcctaaagtgaaatacttgtacttcatcaaaggcttaaacaacctaaatagaggtatggtgctgggcagtttagctgctacagtacgtcttcaggctggaaatgctacagaagtacctgccaattcaactgtgctttccttctgtgcttttgcagtagaccctgctaaagcatataaggattacctagcaagtggaggacaaccaatcaccaactgtgtgaagatgttgtgtacacacactggtacaggacaggcaattactgtaacaccagaagctaacatggaccaagagtcctttggtggtgcttcatgttgtctgtattgtagatgccacattgaccatccaaatcctaaaggattctgtgacttgaaaggtaagtacgtccaaatacctaccacttgtgctaatgacccagtgggttttacacttagaaacacagtctgtaccgtctgcggaatgtggaaaggttatggctgtagttgtgaccaactccgcgaacccttgatgcagtctgcggatgcatcaacgtttttaaacgggtttgcggtgtaagtgcagcccgtcttacaccgtgcggcacaggcactagtactgatgtcgtctacagggcttttgatatttacaacgaaaaaagtgctggttttgcaaagttcctaaaaactaattgctgtcgcttccaggagaaggatgaggaaggcaatttattagactcttactttgtagttaagaggcatactatgtctaactaccaacatgaagagactatttataacttggttaaagattgtccagcggttgctgtccatgactttttcaagtttagagtagatggtgacatggtaccacatatatcacgtcagcgtctaactaaatacacaatggctgatttagtctatgctctacgtcattttgatgagggtaattgtgatacattaaaagaaatactcgtcacatacaattgctgtgatgatgattatttcaataagaaggattggtatgacttcgtagagaatcctgacatcttacgcgtatatgctaacttaggtgagcgtgtacgccaatcattattaaagactgtacaattctgcgatgctatgcgtgatgcaggcattgtaggcgtactgacattagataatcaggatcttaatgggaactggtacgatttcggtgatttcgtacaagtaggaccaggctgcggagttcctattgtggattcatattactcattgctgatgcccatcctcactttgactagggcattggctgctgagtcccatatggatgctgatctcgcaaaaccacttattaagtgggatttgctgaaatatgattttacggaagagagactttgtctcttcgaccgttattttaaatattgggaccagacataccatcccaattgtattaactgtttggatgataggtgtatccttcattgtgcaaactttaatgtgttattttctactgtgtttccacctacaagttttggaccactagtaagaaaaatatttgtagatggtgttccttttgttgtttcaactggataccattttcgtgagttaggagtcgtacataatcaggatgtaaacttacatagctcgcgtctcagtttcaaggaacttttagtgtatgctgctgatccagctatgcatgcagcttctggcaatttattgctagataaacgcactacatgcttttcagtagctgcactaacaaacaatgttgcttttcaaactgtcaaacccggtaattttaataaagacttttatgactttgctgtgtctaaaggtttctttaaggaaggaagttctgttgaactaaaacacttcttctttgctcaggatggcaacgctgctatcagtgattatgactattatcgttataatctgccaacaatgtgtgatatcagacaactcctattcgtagttgaagttgttgataaatactttgattgttacgatggtggctgtattaatgccaaccaagtaatcgttaacaatctggataaatcagctggtttcccatttaataaatggggtaaggctagactttattatgactcaatgagttatgaggatcaagatgcacttttcgcgtatactaagcgtaatgtcatccctactataactcaaatgaatcttaagtatgccattagtgcaaagaatagagctcgcaccgtagctggtgtctctatctgtagtactatgacaaatagacagtttcatcagaaattattgaagtcaatagccgccactagaggagctactgtggtaattggaacaagcaagttttacggtggctggcataatatgttaaaaactgtttacagtgatgtagaaactccacaccttatgggttgggattatccaaaatgtgacagagccatgcctaacatgcttaggataatggcctctcttgttcttgctcgcaaacataacacttgctgtaacttatcacaccgtttctacaggttagctaacgagtgtgcgcaagtattaagtgagatggtcatgtgtggcggctcactatatgttaaaccaggtggaacatcatccggtgatgctacaactgcttatgctaatagtgtctttaacatttgtcaagctgttacagccaatgtaaatgcacttctttcaactgatggtaataagatagctgacaagtatgtccgcaatctacaacacaggctctatgagtgtctctatagaaatagggatgttgatcatgaattcgtggatgagttttacgcttacctgcgtaaacatttctccatgatgattctttctgatgatgccgttgtgtgctataacagtaactatgcggctcaaggtttagtagctagcattaagaactttaaggcagttctttattatcaaaataatgtgttcatgtctgaggcaaaatgttggactgagactgaccttactaaaggacctcacgaattttgctcacagcatacaatgctagttaaacaaggagatgattacgtgtacctgccttacccagatccatcaagaatattaggcgcaggctgttttgtcgatgatattgtcaaaacagatggtacacttatgattgaaaggttcgtgtcactggctattgatgcttacccacttacaaaacatcctaatcaggagtatgctgatgtctttcacttgtatttacaatacattagaaagttacatgatgagcttactggccacatgttggacatgtattccgtaatgctaactaatgataacacctcacggtactgggaacctgagttttatgaggctatgtacacaccacatacagtcttgcaggctgtaggtgcttgtgtattgtgcaattcacagacttcacttcgttgcggtgcctgtattaggagaccattcctatgttgcaagtgctgctatgaccatgtcatttcaacatcacacaaattagtgttgtctgttaatccctatgtttgcaatgccccaggttgtgatgtcactgatgtgacacaactgtatctaggaggtatgagctattattgcaagtcacataagcctcccattagttttccattatgtgctaatggtcaggtttttggtttatacaaaaacacatgtgtaggcagtgacaatgtcactgacttcaatgcgatagcaacatgtgattggactaatgctggcgattacatacttgccaacacttgtactgagagactcaagcttttcgcagcagaaacgctcaaagccactgaggaaacatttaagctgtcatatggtattgccactgtacgcgaagtactctctgacagagaattgcatctttcatgggaggttggaaaacctagaccaccattgaacagaaactatgtctttactggttaccgtgtaactaaaaatagtaaagtacagattggagagtacacctttgaaaaaggtgactatggtgatgctgttgtgtacagaggtactacgacatacaagttgaatgttggtgattactttgtgttgacatctcacactgtaatgccacttagtgcacctactctagtgccacaagagcactatgtgagaattactggcttgtacccaacactcaacatctcagatgagttttctagcaatgttgcaaattatcaaaaggtcggcatgcaaaagtactctacactccaaggaccacctggtactggtaagagtcattttgccatcggacttgctctctattacccatctgctcgcatagtgtatacggcatgctctcatgcagctgttgatgccctatgtgaaaaggcattaaaatatttgcccatagataaatgtagtagaatcatacctgcgcgtgcgcgcgtagagtgttttgataaattcaaagtgaattcaacactagaacagtatgttttctgcactgtaaatgcattgccagaaacaactgctgacattgtagtctttgatgaaatctctatggctactaattatgacttgagtgttgtcaatgctagacttcgtgcaaaacactacgtctatattggcgatcctgctcaattaccagccccccgcacattgctgactaaaggcacactagaaccagaatattttaattcagtgtgcagacttatgaaaacaataggtccagacatgttccttggaacttgtcgccgttgtcctgctgaaattgttgacactgtgagtgctttagtttatgacaataagctaaaagcacacaaggataagtcagctcaatgcttcaaaatgttctacaaaggtgttattacacatgatgtttcatctgcaatcaacagacctcaaataggcgttgtaagagaatttcttacacgcaatcctgcttggagaaaagctgtttttatctcaccttataattcacagaacgctgtagcttcaaaaatcttaggattgcctacgcagactgttgattcatcacagggttctgaatatgactatgtcatattcacacaaactactgaaacagcacactcttgtaatgtcaaccgcttcaatgtggctatcacaagggcaaaaattggcattttgtgcataatgtctgatagagatctttatgacaaactgcaatttacaagtctagaaataccacgtcgcaatgtggctacattacaagcagaaaatgtaactggactttttaaggactgtagtaagatcattactggtcttcatcctacacaggcacctacacacctcagcgttgatataaaattcaagactgaaggattatgtgttgacataccaggcataccaaaggacatgacctaccgtagactcatctctatgatgggtttcaaaatgaattaccaagtcaatggttaccctaatatgtttatcacccgcgaagaagctattcgtcacgttcgtgcgtggattggctttgatgtagagggctgtcatgcaactagagatgctgtgggtactaacctacctctccagctaggattttctacaggtgttaacttagtagctgtaccgactggttatgttgacactgaaaataacacagaattcaccagagttaatgcaaaacctccaccaggtgaccagtttaaacatcttataccactcatgtataaaggcttgccctggaatgtagtgcgtattaagatagtacaaatgctcagtgatacactgaaaggattgtcagacagagtcgtgttcgtcctttgggcgcatggctttgagcttacatcaatgaagtactttgtcaagattggacctgaaagaacgtgttgtctgtgtgacaaacgtgcaacttgcttttctacttcatcagatacttatgcctgctggaatcattctgtgggttttgactatgtctataacccatttatgattgatgttcagcagtggggctttacgggtaaccttcagagtaaccatgaccaacattgccaggtacatggaaatgcacatgtggctagttgtgatgctatcatgactagatgtttagcagtccatgagtgctttgttaagcgcgttgattggtctgttgaataccctattataggagatgaactgagggttaattctgcttgcagaaaagtacaacacatggttgtgaagtctgcattgcttgctgataagtttccagttcttcatgacattggaaatccaaaggctatcaagtgtgtgcctcaggctgaagtagaatggaagttctacgatgctcagccatgtagtgacaaagcttacaaaatagaggaactcttctattcttatgctacacatcacgataaattcactgatggtgtttgtttgttttggaattgtaacgttgatcgttacccagccaatgcaattgtgtgtaggtttgacacaagagtcttgtcaaacttgaacttaccaggctgtgatggtggtagtttgtatgtgaataagcatgcattccacactccagctttcgataaaagtgcatttactaatttaaagcaattgcctttcttttactattctgatagtccttgtgagtctcatggcaaacaagtagtgtcggatattgattatgttccactcaaatctgctacgtgtattacacgatgcaatttaggtggtgctgtttgcagacaccatgcaaatgagtaccgacagtacttggatgcatataatatgatgatttctgctggatttagcctatggatttacaaacaatttgatacttataacctgtggaatacatttaccaggttacagagtttagaaaatgtggcttataatgttgttaataaaggacactttgatggacacgccggcgaagcacctgtttccatcattaataatgctgtttacacaaaggtagatggtattgatgtggagatctttgaaaataagacaacacttcctgttaatgttgcatttgagctttgggctaagcgtaacattaaaccagtgccagagattaagatactcaataatttgggtgttgatatcgctgctaatactgtaatctgggactacaaaagagaagccccagcacatgtatctacaataggtgtctgcacaatgactgacattgccaagaaacctactgagagtgcttgttcttcacttactgtcttgtttgatggtagagtggaaggacaggtagacctttttagaaacgcccgtaatggtgttttaataacagaaggttcagtcaaaggtctaacaccttcaaagggaccagcacaagctagcgtcaatggagtcacattaattggagaatcagtaaaaacacagtttaactactttaagaaagtagacggcattattcaacagttgcctgaaacctactttactcagagcagagacttagaggattttaagcccagatcacaaatggaaactgactttctcgagctcgctatggatgaattcatacagcgatataagctcgagggctatgccttcgaacacatcgtttatggagatttcagtcatggacaacttggcggtcttcatttaatgataggcttagccaagcgctcacaagattcaccacttaaattagaggattttatccctatggacagcacagtgaaaaattacttcataacagatgcgcaaacaggttcatcaaaatgtgtgtgttctgtgattgatcttttacttgatgactttgtcgagataataaagtcacaagatttgtcagtgatttcaaaagtggtcaaggttacaattgactatgctgaaatttcattcatgctttggtgtaaggatggacatgttgaaaccttctacccaaaactacaagcaagtcaagcgtggcaaccaggtgttgcgatgcctaacttgtacaagatgcaaagaatgcttcttgaaaagtgtgaccttcagaattatggtgaaaatgctgttataccaaaaggaataatgatgaatgtcgcaaagtatactcaactgtgtcaatacttaaatacacttactttagctgtaccctacaacatgagagttattcactttggtgctggctctgataaaggagttgcaccaggtacagctgtgctcagacaatggttgccaactggcacactacttgtcgattcagatcttaatgacttcgtctccgacgcagattctactttaattggagactgtgcaacagtacatacggctaataaatgggaccttattattagcgatatgtatgaccctaggaccaaacatgtgacaaaagagaatgactctaaagaagggtttttcacttatctgtgtggatttataaagcaaaaactagccctgggtggttctatagctgtaaagataacagagcattcttggaatgctgacctttacaagcttatgggccatttctcatggtggacagcttttgttacaaatgtaaatgcatcatcatcggaagcatttttaattggggctaactatcttggcaagccgaaggaacaaattgatggctataccatgcatgctaactacattttctggaggaacacaaatcctatccagttgtcttcctattcactctttgacatgagcaaatttcctcttaaattaagaggaactgctgtaatgtctcttaaggagaatcaaatcaatgatatgatttattctcttctggaaaaaggtaggcttatcattagagaaaacaacagagttgtggtttcaagtgatattcttgttaacaactaaacgaacatgtttattttcttattatttcttactctcactagtggtagtgaccttgaccggtgcaccacttttgatgatgttcaagctcctaattacactcaacatacttcatctatgaggggggtttactatcctgatgaaatttttagatcagacactctttatttaactcaggatttatttcttccattttattctaatgttacagggtttcatactattaatcatacgtttggcaaccctgtcataccttttaaggatggtatttattttgctgccacagagaaatcaaatgttgtccgtggttgggtttttggttctaccatgaacaacaagtcacagtcggtgattattattaacaattctactaatgttgttatacgagcatgtaactttgaattgtgtgacaaccctttctttgctgtttctaaacccatgggtacacagacacatactatgatattcgataatgcatttaattgcactttcgagtacatatctgatgccttttcgcttgatgtttcagaaaagtcaggtaattttaaacacttacgagagtttgtgtttaaaaataaagatgggtttctctatgtttataagggctatcaacctatagatgtagttcgtgatctaccttctggttttaacactttgaaacctatttttaagttgcctcttggtattaacattacaaattttagagccattcttacagccttttcacctgctcaagacatttggggcacgtcagctgcagcctattttgttggctatttaaagccaactacatttatgctcaagtatgatgaaaatggtacaatcacagatgctgttgattgttctcaaaatccacttgctgaactcaaatgctctgttaagagctttgagattgacaaaggaatttaccagacctctaatttcagggttgttccctcaggagatgttgtgagattccctaatattacaaacttgtgtccttttggagaggtttttaatctactaaattcccttctgtctatgcatgggagagaaaaaaaatttctaattgtgttgctgattactctgtgctctacaactcaacatttttttcaacctttaagtgctatggcgtttctgccactaagttgaatgatctttgcttctccaatgtctatgcagattcttttgtagtcaagggagatgatgtaagacaaatagcgccaggacaaactggtgttattgctgattataattataaattgccagatgatttcatgggttgtgtccttgcttggaatactaggaacattgatgctacttcaactggtaattataattataaatataggtatcttagacatggcaagcttaggccctttgagagagacatatctaatgtgcctttctcccctgatggcaaaccttgcaccccacctgctcttaattgttattggccattaaatgattatggtttttacaccactactggcattggctaccaaccttacagagttgtagtactttcttttgaacttttaaatgcaccggccacggtttgtggaccaaaattatccactgaccttattaagaaccagtgtgtcaattttaattttaatggactcactggtactggtgtgttaactccttcttcaaagagatttcaaccatttcaacaatttggccgtgatgtttctgatttcactgattccgttcgagatcctaaaacatctgaaatattagacatttcaccttgctcttttgggggtgtaagtgtaattacacctggaacaaatgcttcatctgaagttgctgttctatatcaagatgttaactgcactgatgtttctacagcaattcatgcagatcaactcacaccagcttggcgcatatattctactggaaacaatgtattccagactcaagcaggctgtcttataggagctgagcatgtcgacacttcttatgagtgcgacattcctattggagctggcatttgtgctagttaccatacagtttctttattacgtagtactagccaaaaatctattgtggcttatactatgtctttaggtgctgatagttcaattgcttactctaataacaccattgctatacctactaacttttcaattagcattactacagaagtaatgcctgtttctatggctaaaacctccgtagattgtaatatgtacatctgcggagattctactgaatgtgctaatttgcttctccaatatggtagcttttgcacacaactaaatcgtgcactctcaggtattgctgctgaacaggatcgcaacacacgtgaagtgttcgctcaagtcaaacaaatgtacaaaaccccaactttgaaatattttggtggttttaatttttcacaaatattacctgaccctctaaagccaactaagaggtcttttattgaggacttgctctttaataaggtgacactcgctgatgctggcttcatgaagcaatatggcgaatgcctaggtgatattaatgctagagatctcatttgtgcgcagaagttcaatggacttacagtgttgccacctctgctcactgatgatatgattgctgcctacactgctgctctagttagtggtactgccactgctggatggacatttggtgctggcgctgctcttcaaataccttttgctatgcaaatggcatataggttcaatggcattggagttacccaaaatgttctctatgagaaccaaaaacaaatcgccaaccaatttaacaaggcgattagtcaaattcaagaatcacttacaacaacatcaactgcattgggcaagctgcaagacgttgttaaccagaatgctcaagcattaaacacacttgttaaacaacttagctctaattttggtgcaatttcaagtgtgctaaatgatatcctttcgcgacttgataaagtcgaggcggaggtacaaattgacaggttaattacaggcagacttcaaagccttcaaacctatgtaacacaacaactaatcagggctgctgaaatcagggcttctgctaatcttgctgctactaaaatgtctgagtgtgttcttggacaatcaaaaagagttgacttttgtggaaagggctaccaccttatgtccttcccacaagcagccccgcatggtgttgtcttcctacatgtcacgtatgtgccatcccaggagaggaacttcaccacagcgccagcaatttgtcatgaaggcaaagcatacttccctcgtgaaggtgtttttgtgtttaatggcacttcttggtttattacacagaggaacttcttttctccacaaataattactacagacaatacatttgtctcaggaaattgtgatgtcgttattggcatcattaacaacacagtttatgatcctctgcaacctgagcttgactcattcaaagaagagctggacaagtacttcaaaaatcatacatcaccagatgttgatcttggcgacatttcaggcattaacgcttctgtcgtcaacattcaaaaagaaattgaccgcctcaatgaggtcgctaaaaatttaaatgaatcactcattgaccttcaagaattgggaaaatatgagcaatatattaaatggccttggtatgtttggctcggcttcattgctggactaattgccatcgtcatggttacaatcttgctttgttgcatgactagttgttgcagttgcctcaagggtgcatgctcttgtggttcttgctgcaagtttgatgaggatgactctgagccagttctcaagggtgtcaaattacattacacataaacgaacttatggatttgtttatgagattttttactcttggatcaattactgcacagccagtaaaaattgacaatgcttctcctgcaagtactgttcatgctacagcaacgataccgctacaagcctcactccctttcggatggcttgttattggcgttgcatttcttgctgtttttcagagcgctaccaaaataattgcgctcaataaaagatggcagctagccctttataagggcttccagttcatttgcaatttactgctgctatttgttaccatctattcacatcttttgcttgtcgctgcaggtaaggaggcgcaatttttgtacctctatgccttgatatattttctacaatgcatcaacgcatgtagaattattatgagatgttggctttgttggaagtgcaaatccaagaacccattactttatgatgccaactactttgtttgctggcacacacataactatgactactgtataccatataacagtgtcacagatacaattgtcgttactgaagggacggcatttcaacaccaaaactcaaagaagactaccaaattggtggttattctgaggataggcactcaggtgttaaagactatgtcgttgtacatggctatttcaccgaagtttactaccagcttgagtctacacaaattactacagacactggtattgaaaatgctacattcttcatctttaacaagcttgttaaagacccaccgaatgtgcaaatacacacaatcgacggctcttcaggagttgctaatccagcaatggatccaatttatgatgagccgacgacgactactagcgtgcctttgtaagcacaagaaagtgagtacgaacttatgtactcattcgtttcggaagaaacaggtacgttaatagttaatagcgtacttctttttcttgctttcgtggtattcttgctagtcacactagccatccttactgcgcttcgattgtgtgcgtactgctgcaatattgttaacgtgagtttagtaaaaccaacggtttacgtctactcgcgtgttaaaaatctgaactcttctgaaggagttcctgatcttctggtctaaacgaactaactattattattattctgtttggaactttaacattgcttatcatggcagacaacggtactattaccgttgaggagcttaaacaactcctggaacaatggaacctagtaataggtttcctattcctagcctggattatgttactacaatttgcctattctaatcggaacaggtttttgtacataataaagcttgttttcctctggctcttgtggccagtaacacttgcttgttttgtgcttgctgttgtctacagaattaattgggtgactggcgggattgcgattgcaatggcttgtattgtaggcttgatgtggcttagctacttcgttgcttccttcaggctgtttgctcgtacccgctcaatgtggtcattcaacccagaaacaaacattcttctcaatgtgcctctccgggggacaattgtgaccagaccgctcatggaaagtgaacttgtcattggtgctgtgatcattcgtggtcacttgcgaatggccggacactccctagggcgctgtgacattaaggacctgccaaaagagatcactgtggctacatcacgaacgctttcttattacaaattaggagcgtcgcagcgtgtaggcactgattcaggttttgctgcatacaaccgctaccgtattggaaactataaattaaatacagaccacgccggtagcaacgacaatattgctttgctagtacagtaagtgacaacagatgtttcatcttgttgacttccaggttacaatagcagagatattgattatcattatgaggactttcaggattgctatttggaatcttgacgttataataagttcaatagtgagacaattatttaagcctctaactaagaagaattattcggagttagatgatgaagaacctatggagttagattatccataaaacgaacatgaaaattattctcttcctgacattgattgtatttacatcttgcgagctatatcactatcaggagtgtgttagaggtacgactgtactactaaaagaaccttgcccatcaggaacatacgagggcaattcaccatttcaccctcttgctgacaataaatttgcactaacttgcactagcacacactttgcttttgcttgtgctgacggtactcgacatacctatcagctgcgtgcaagatcagtttcaccaaaacttttcatcagacaagaggaggttcaacaagagctctactcgccactttttctcattgttgctgctctagtatttttaatactttgcttcaccattaagagaaagacagaatgaatgagctcactttaattgacttctatttgtgctttttagcctttctgctattccttgttttaataatgcttattatattttggttttcactcgaaatccaggatctagaagaaccttgtaccaaagtctaaacgaacatgaaacttctcattgttttgacttgtatttctctatgcagttgcatatgcactgtagtacagcgctgtgcatctaataaacctcatgtgcttgaagatccttgtaaggtacaacactaggggtaatacttatagcactgcttggctttgtgctctaggaaaggttttaccttttcatagatggcacactatggttcaaacatgcacacctaatgttactatcaactgtcaagatccagctggtggtgcgcttatagctaggtgttggtaccttcatgaaggtcaccaaactgctgcatttagagacgtacttgttgttttaaataaacgaacaaattaaaatgtctgataatggaccccaatcaaaccaacgtagtgccccccgcattacatttggtggacccacagattcaactgacaataaccagaatggaggacgcaatggggcaaggccaaaacagcgccgaccccaaggtttacccaataatactgcgtcttggttcacagctctcactcagcatggcaaggaggaacttagattccctcgaggccagggcgttccaatcaacaccaatagtggtccagatgaccaaattggctactaccgaagagctacccgacgagttcgtggtggtgacggcaaaatgaaagagctcagccccagatggtacttctattacctaggaactggcccagaagcttcacttccctacggcgctaacaaagaaggcatcgtatgggttgcaactgagggagccttgaatacacccaaagaccacattggcacccgcaatcctaataacaatgctgccaccgtgctacaacttcctcaaggaacaacattgccaaaaggcttctacgcagagggaagcagaggcggcagtcaagcctcttctcgctcctcatcacgtagtcgcggtaattcaagaaattcaactcctggcagcagtaggggaaattctcctgctcgaatggctagcggaggtggtgaaactgccctcgcgctattgctgctagacagattgaaccagcttgagagcaaagtttctggtaaaggccaacaacaacaaggccaaactgtcactaagaaatctgctgctgaggcatctaaaaagcctcgccaaaaacgtactgccacaaaacagtacaacgtcactcaagcatttgggagacgtggtccagaacaaacccaaggaaatttcggggaccaagacctaatcagacaaggaactgattacaaacattggccgcaaattgcacaatttgctccaagtgcctctgcattctttggaatgtcacgcattggcatggaagtcacaccttcgggaacatggctgacttatcatggagccattaaattggatgacaaagatccacaattcaaagacaacgtcatactgctgaacaagcacattgacgcatacaaaacattcccaccaacagagcctaaaaaggacaaaaagaaaaagactgatgaagctcagcctttgccgcagagacaaaagaagcagcccactgtgactcttcttcctgcggctgacatggatgatttctccagacaacttcaaaattccatgagtggagcttctgctgattcaactcaggcataaacactcatgatgaccacacaaggcagatgggctatgtaaacgttttcgcaattccgtttacgatacatagtctactcttgtgcagaatgaattctcgtaactaaacagcacaagtaggtttagttaactttaatctcacatagcaatctttaatcaatgtgtaacattagggaggacttgaaagagccaccacattttcatcgaggccacgcggagtacgatcgagggtacagtgaataatgctagggagagctgcctatatggaagagccctaatgtgtaaaattaattttagtagtgctatccccatgtgattttaatagcttcttaggagaatgacaaaaaaaaaaaaaaa

SEQ ID NO: 709 - DNA, 29742 bp, SARS-CoV Virus
  CDS (1)..(29742)
atattaggtttttacctacccaggaaaagccaaccaacctcgatctcttgtagatctgttctctaaacgaactttaaaatctgtgtagctgtcgctcggctgcatgcctagtgcacctacgcagtataaacaataataaattttactgtcgttgacaagaaacgagtaactcgtccctcttctgcagactgcttacggtttcgtccgtgttgcagtcgatcatcagcatacctaggtttcgtccgggtgtgaccgaaaggtaagatggagagccttgttcttggtgtcaacgagaaaacacacgtccaactcagtttgcctgtccttcaggttagagacgtgctagtgcgtggcttcggggactctgtggaagaggccctatcggaggcacgtgaacacctcaaaaatggcacttgtggtctagtagagctggaaaaaggcgtactgccccagcttgaacagccctatgtgttcattaaacgttctgatgccttaagcaccaatcacggccacaaggtcgttgagctggttgcagaaatggacggcattcagtacggtcgtagcggtataacactgggagtactcgtgccacatgtgggcgaaaccccaattgcataccgcaatgttcttcttcgtaagaacggtaataagggagccggtggtcatagctatggcatcgatctaaagtcttatgacttaggtgacgagcttggcactgatcccattgaagattatgaacaaaactggaacactaagcatggcagtggtgcactccgtgaactcactcgtgagctcaatggaggtgcagtcactcgctatgtcgacaacaatttctgtggcccagatgggtaccctcttgattgcatcaaagattttctcgcacgcgcgggcaagtcaatgtgcactctttccgaacaacttgattacatcgagtcgaagagaggtgtctactgctgccgtgaccatgagcatgaaattgcctggttcactgagcgctctgataagagctacgagcaccagacacccttcgaaattaagagtgccaagaaatttgacactttcaaaggggaatgcccaaagtttgtgtttcctcttaactcaaaagtcaaagtcattcaaccacgtgttgaaaagaaaaagactgagggtttcatggggcgtatacgctctgtgtaccctgttgcatctccacaggagtgtaacaatatgcacttgtctaccttgatgaaatgtaatcattgcgatgaagtttcatggcagacgtgcgactttctgaaagccacttgtgaacattgtggcactgaaaatttagttattgaaggacctactacatgtgggtacctacctactaatgctgtagtgaaaatgccatgtcctgcctgtcaagacccagagattggacctgagcatagtgttgcagattatcacaaccactcaaacattgaaactcgactccgcaagggaggtaggactagatgttttggaggctgtgtgtttgcctatgttggctgctataataagcgtgcctactgggttcctcgtgctagtgctgatattggctcaggccatactggcattactggtgacaatgtggagaccttgaatgaggatctccttgagatactgagtcgtgaacgtgttaacattaacattgttggcgattttcatttgaatgaagaggttgccatcattttggcatctttctctgcttctacaagtgcctttattgacactataaagagtcttgattacaagtctttcaaaaccattgttgagtcctgcggtaactataaagttaccaagggaaagcccgtaaaaggtgcttggaacattggacaacagagatcagttttaacaccactgtgtggttttccctcacaggctgctggtgttatcagatcaatttttgcgcgcacacttgatgcagcaaaccactcaattcctgatttgcaaagagcagctgtcaccatacttgatggtatttctgaacagtcattacgtcttgtcgacgccatggtttatacttcagacctgctcaccaacagtgtcattattatggcatatgtaactggtggtcttgtacaacagacttctcagtggttgtctaatcttttgggcactactgttgaaaaactcaggcctatctttgaatggattgaggcgaaacttagtgcaggagttgaatttctcaaggatgcttgggagattctcaaatttctcattacaggtgtttttgacatcgtcaagggtcaaatacaggttgcttcagataacatcaaggattgtgtaaaatgcttcattgatgttgttaacaaggcactcgaaatgtgcattgatcaagtcactatcgctggcgcaaagttgcgatcactcaacttaggtgaagtcttcatcgctcaaagcaagggactttaccgtcagtgtatacgtggcaaggagcagctgcaactactcatgcctcttaaggcaccaaaagaagtaacctttcttgaaggtgattcacatgacacagtacttacctctgaggaggttgttctcaagaacggtgaactcgaagcactcgagacgcccgttgatagcttcacaaatggagctatcgtcggcacaccagtctgtgtaaatggcctcatgctcttagagattaaggacaaagaacaatactgcgcattgtctcctggtttactggctacaaacaatgtctttcgcttaaaagggggtgcaccaattaaaggtgtaacctttggagaagatactgtttgggaagttcaaggttacaagaatgtgagaatcacatttgagcttgatgaacgtgttgacaaagtgcttaatgaaaagtgctctgtctacactgttgaatccggtaccgaagttactgagtttgcatgtgttgtagcagaggctgttgtgaagactttacaaccagtttctgatctccttaccaacatgggtattgatcttgatgagtggagtgtagctacattctacttatttgatgatgctggtgaagaaaacttttcatcacgtatgtattgttccttttaccctccagatgaggaagaagaggacgatgcagagtgtgaggaagaagaaattgatgaaacctgtgaacatgagtacggtacagaggatgattatcaaggtctccctctggaatttggtgcctcagctgaaacagttcgagttgaggaagaagaagaggaagactggctggatgatactactgagcaatcagagattgagccagaaccagaacctacacctgaagaaccagttaatcagtttactggttatttaaaacttactgacaatgttgccattaaatgtgttgacatcgttaaggaggcacaaagtgctaatcctatggtgattgtaaatgctgctaacatacacctgaaacatggtggtggtgtagcaggtgcactcaacaaggcaaccaatggtgccatgcaaaaggagagtgatgattacattaagctaaatggccctcttacagtaggagggtcttgtttgctttctggacataatcttgctaagaagtgtctgcatgttgttggacctaacctaaatgcaggtgaggacatccagcttcttaaggcagcatatgaaaatttcaattcacaggacatcttacttgcaccattgttgtcagcaggcatatttggtgctaaaccacttcagtctttacaagtgtgcgtgcagacggttcgtacacaggtttatattgcagtcaatgacaaagctctttatgagcaggttgtcatggattatcttgataacctgaagcctagagtggaagcacctaaacaagaggagccaccaaacacagaagattccaaaactgaggagaaatctgtcgtacagaagcctgtcgatgtgaagccaaaaattaaggcctgcattgatgaggttaccacaacactggaagaaactaagtttcttaccaataagttactcttgtttgctgatatcaatggtaagctttaccatgattctcagaacatgcttagaggtgaagatatgtctttccttgagaaggatgcaccttacatggtaggtgatgttatcactagtggtgatatcacttgtgttgtaataccctccaaaaaggctggtggcactactgagatgctctcaagagctttgaagaaagtgccagttgatgagtatataaccacgtaccctggacaaggatgtgctggttatacacttgaggaagctaagactgctcttaagaaatgcaaatctgcattttatgtactaccttcagaagcacctaatgctaaggaagagattctaggaactgtatcctggaatttgagagaaatgcttgctcatgctgaagagacaagaaaattaatgcctatatgcatggatgttagagccataatggcaaccatccaacgtaagtataaaggaattaaaattcaagagggcatcgttgactatggtgtccgattcttcttttatactagtaaagagcctgtagcttctattattacgaagctgaactctctaaatgagccgcttgtcacaatgccaattggttatgtgacacatggttttaatcttgaagaggctgcgcgctgtatgcgttctcttaaagctcctgccgtagtgtcagtatcatcaccagatgctgttactacatataatggatacctcacttcgtcatcaaagacatctgaggagcactttgtagaaacagtttctttggctggctcttacagagattggtcctattcaggacagcgtacagagttaggtgttgaatttcttaagcgtggtgacaaaattgtgtaccacactctggagagccccgtcgagtttcatcttgacggtgaggttctttcacttgacaaactaaagagtctcttatccctgcgggaggttaagactataaaagtgttcacaactgtggacaacactaatctccacacacagcttgtggatatgtctatgacatatggacagcagtttggtccaacatacttggatggtgctgatgttacaaaaattaaacctcatgtaaatcatgagggtaagactttctttgtactacctagtgatgacacactacgtagtgaagctttcgagtactaccatactcttgatgagagttttcttggtaggtacatgtctgctttaaaccacacaaagaaatggaaatttcctcaagttggtggtttaacttcaattaaatgggctgataacaattgttatttgtctagtgttttattagcacttcaacagcttgaagtcaaattcaatgcaccagcacttcaagaggcttattatagagcccgtgctggtgatgctgctaacttttgtgcactcatactcgcttacagtaataaaactgttggcgagcttggtgatgtcagagaaactatgacccatcttctacagcatgctaatttggaatctgcaaagcgagttcttaatgtggtgtgtaaacattgtggtcagaaaactactaccttaacgggtgtagaagctgtgatgtatatgggtactctatcttatgataatcttaagacaggtgtttccattccatgtgtgtgtggtcgtgatgctacacaatatctagtacaacaagagtcttcttttgttatgatgtctgcaccacctgctgagtataaattacagcaaggtacattcttatgtgcgaatgagtacactggtaactatcagtgtggtcattacactcatataactgctaaggagaccctctatcgtattgacggagctcaccttacaaagatgtcagagtacaaaggaccagtgactgatgttttctacaaggaaacatcttacactacaaccatcaagcctgtgtcgtataaactcgatggagttacttacacagagattgaaccaaaattggatgggtattataaaaaggataatgcttactatacagagcagcctatagaccttgtaccaactcaaccattaccaaatgcgagttttgataatttcaaactcacatgttctaacacaaaatttgctgatgatttaaatcaaatgacaggcttcacaaagccagcttcacgagagctatctgtcacattcttcccagacttgaatggcgatgtagtggctattgactatagacactattcagcgagtttcaagaaaggtgctaaattactgcataagccaattgtttggcacattaaccaggctacaaccaagacaacgttcaaaccaaacacttggtgtttacgttgtctttggagtacaaagccagtagatacttcaaattcatttgaagttctggcagtagaagacacacaaggaatggacaatcttgcttgtgaaagtcaacaacccacctctgaagaagtagtggaaaatcctaccatacagaaggaagtcatagagtgtgacgtgaaaactaccgaagttgtaggcaatgtcatacttaaaccatcagatgaaggtgttaaagtaacacaagagttaggtcatgaggatcttatggctgcttatgtggaaaacacaagcattaccattaagaaacctaatgagctttcactagccttaggtttaaaaacaattgccactcatggtattgctgcaattaatagtgttccttggagtaaaattttggcttatgtcaaaccattcttaggacaagcagcaattacaacatcaaattgcgctaagagattagcacaacgtgtgtttaacaattatatgccttatgtgtttacattattgttccaattgtgtacttttactaaaagtaccaattctagaattagagcttcactacctacaactattgctaaaaatagtgttaagagtgttgctaaattatgtttggatgccggcattaattatgtgaagtcacccaaattttctaaattgttcacaatcgctatgtggctattgttgttaagtatttgcttaggttctctaatctgtgtaactgctgcttttggtgtactcttatctaattttggtgctccttcttattgtaatggcgttagagaattgtatcttaattcgtctaacgttactactatggatttctgtgaaggttcttttccttgcagcatttgtttaagtggattagactcccttgattcttatccagctcttgaaaccattcaggtgacgatttcatcgtacaagctagacttgacaattttaggtctggccgctgagtgggttttggcatatatgttgttcacaaaattcttttatttattaggtctttcagctataatgcaggtgttctttggctattttgctagtcatttcatcagcaattcttggctcatgtggtttatcattagtattgtacaaatggcacccgtttctgcaatggttaggatgtacatcttctttgcttctttctactacatatggaagagctatgttcatatcatggatggttgcacctcttcgacttgcatgatgtgctataagcgcaatcgtgccacacgcgttgagtgtacaactattgttaatggcatgaagagatctttctatgtctatgcaaatggaggccgtggcttctgcaagactcacaattggaattgtctcaattgtgacacattttgcactggtagtacattcattagtgatgaagttgctcgtgatttgtcactccagtttaaaagaccaatcaaccctactgaccagtcatcgtatattgttgatagtgttgctgtgaaaaatggcgcgcttcacctctactttgacaaggctggtcaaaagacctatgagagacatccgctctcccattttgtcaatttagacaatttgagagctaacaacactaaaggttcactgcctattaatgtcatagtttttgatggcaagtccaaatgcgacgagtctgcttctaagtctgcttctgtgtactacagtcagctgatgtgccaacctattctgttgcttgaccaagctcttgtatcaaacgttggagatagtactgaagtttccgttaagatgtttgatgcttatgtcgacaccttttcagcaacttttagtgttcctatggaaaaacttaaggcacttgttgctacagctcacagcgagttagcaaagggtgtagctttagatggtgtcctttctacattcgtgtcagctgcccgacaaggtgttgttgataccgatgttgacacaaaggatgttattgaatgtctcaaactttcacatcactctgacttagaagtgacaggtgacagttgtaacaatttcatgctcacctataataaggttgaaaacatgacgcccagagatcttggcgcatgtattgactgtaatgcaaggcatatcaatgcccaagtagcaaaaagtcacaatgtttcactcatctggaatgtaaaagactacatgtctttatctgaacagctgcgtaaacaaattcgtactgctgccaagaagaacaacataccttttacactaacttgtgctacaactagacaggttgtcaatgtcataactactaaaatctcactcaagggtggtaagattgttagtacttgttttaaacttatgcttaaggccacattattgtgcgttcttgctgcattggtttgttatatcgttatgccagtacatacattgtcaatccatgatggttacacaaatgaaatcattggttacaaagccattcaggatggtgtcactcgtgacatcatttctactgatgattgttttgcaaataaacatgctggttttgacgcatggtttagccagcgtggtggttcatacaaaaatgacaaaagctgccctgtagtagctgctatcattacaagagagattggtttcatagtgcctggcttaccgggtactgtgctgagagcaatcaatggtgacttcttgcattttctacctcgtgtttttagtgctgttggcaacatttgctacacaccttccaaactcattgagtatagtgattttgctacctctgcttgcgttcttgctgctgagtgtacaatttttaaggatgctatgggcaaacctgtgccatattgttatgacactaatttgctagagggttctatttcttatagtgagcttcgtccagacactcgttatgtgcttatggatggttccatcatacagtttcctaacacttacctggagggttctgttagagtagtaacaacttttgatgctgagtactgtagacatggtacatgcgaaaggtcagaagtaggtatttgcctatctaccagtggtagatgggttcttaataatgagcattacagagctctatcaggagttttctgtggtgttgatgcgatgaatctcatagctaacatctttactcctcttgtgcaacctgtgggtgctttagatgtgtctgcttcagtagtggctggtggtattattgccatattggtgacttgtgctgcctactactttatgaaattcagacgtgtttttggtgagtacaaccatgttgttgctgctaatgcacttttgtttttgatgtctttcactatactctgtctggtaccagcttacagctttctgccgggagtctactcagtcttttacttgtacttgacattctatttcaccaatgatgtttcattcttggctcaccttcaatggtttgccatgttttctcctattgtgcctttttggataacagcaatctatgtattctgtatttctctgaagcactgccattggttctttaacaactatcttaggaaaagagtcatgtttaatggagttacatttagtaccttcgaggaggctgctttgtgtacctttttgctcaacaaggaaatgtacctaaaattgcgtagcgagacactgttgccacttacacagtataacaggtatcttgctctatataacaagtacaagtatttcagtggagccttagatactaccagctatcgtgaagcagcttgctgccacttagcaaaggctctaaatgactttagcaactcaggtgctgatgttctctaccaaccaccacagacatcaatcacttctgctgttctgcagagtggttttaggaaaatggcattcccgtcaggcaaagttgaagggtgcatggtacaagtaacctgtggaactacaactcttaatggattgtggttggatgacacagtatactgtccaagacatgtcatttgcacagcagaagacatgcttaatcctaactatgaagatctgctcattcgcaaatccaaccatagctttcttgttcaggctggcaatgttcaacttcgtgttattggccattctatgcaaaattgtctgcttaggcttaaagttgatacttctaaccctaagacacccaagtataaatttgtccgtatccaacctggtcaaacattttcagttctagcatgctacaatggttcaccatctggtgtttatcagtgtgccatgagacctaatcataccattaaaggttctttccttaatggatcatgtggtagtgttggttttaacattgattatgattgcgtgtctttctgctatatgcatcatatggagcttccaacaggagtacacgctggtactgacttagaaggtaaattctatggtccatttgttgacagacaaactgcacaggctgcaggtacagacacaaccataacattaaatgttttggcatggctgtatgctgctgttatcaatggtgataggtggtttcttaatagattcaccactactttgaatgactttaaccttgtggcaatgaagtacaactatgaacctttgacacaagatcatgttgacatattgggacctctttctgctcaaacaggaattgccgtcttagatatgtgtgctgctttgaaagagctgctgcagaatggtatgaatggtcgtactatccttggtagcactattttagaagatgagtttacaccatttgatgttgttagacaatgctctggtgttaccttccaaggtaagttcaagaaaattgttaagggcactcatcattggatgcttttaactttcttgacatcactattgattcttgttcaaagtacacagtggtcactgtttttctttgtttacgagaatgctttcttgccatttactcttggtattatggcaattgctgcatgtgctatgctgcttgttaagcataagcacgcattcttgtgcttgtttctgttaccttctcttgcaacagttgcttactttaatatggtctacatgcctgctagctgggtgatgcgtatcatgacatggcttgaattggctgacactagcttgtctggttataggcttaaggattgtgttatgtatgcttcagctttagttttgcttattctcatgacagctcgcactgtttatgatgatgctgctagacgtgtttggacactgatgaatgtcattacacttgtttacaaagtctactatggtaatgctttagatcaagctatttccatgtgggccttagttatttctgtaacctctaactattctggtgtcgttacgactatcatgtttttagctagagctatagtgtttgtgtgtgttgagtattacccattgttatttattactggcaacaccttacagtgtatcatgcttgtttattgtttcttaggctattgttgctgctgctactttggccttttctgtttactcaaccgttacttcaggcttactcttggtgtttatgactacttggtctctacacaagaatttaggtatatgaactcccaggggcttttgcctcctaagagtagtattgatgctttcaagcttaacattaagttgttgggtattggaggtaaaccatgtatcaaggttgctactgtacagtctaaaatgtctgacgtaaagtgcacatctgtggtactgctctcggttcttcaacaacttagagtagagtcatcttctaaattgtgggcacaatgtgtacaactccacaatgatattcttcttgcaaaagacacaactgaagctttcgagaagatggtttctcttttgtctgttttgctatccatgcagggtgctgtagacattaataggttgtgcgaggaaatgctcgataaccgtgctactcttcaggctattgcttcagaatttagttctttaccatcatatgccgcttatgccactgcccaggaggcctatgagcaggctgtagctaatggtgattctgaagtcgttctcaaaaagttaaagaaatctttgaatgtggctaaatctgagtttgaccgtgatgctgccatgcaacgcaagttggaaaagatggcagatcaggctatgacccaaatgtacaaacaggcaagatctgaggacaagagggcaaaagtaactagtgctatgcaaacaatgctcttcactatgcttaggaagcttgataatgatgcacttaacaacattatcaacaatgcgcgtgatggttgtgttccactcaacatcataccattgactacagcagccaaactcatggttgttgtccctgattatggtacctacaagaacacttgtgatggtaacacctttacatatgcatctgcactctgggaaatccagcaagttgttgatgcggatagcaagattgttcaacttagtgaaattaacatggacaattcaccaaatttggcttggcctcttattgttacagctctaagagccaactcagctgttaaactacagaataatgaactgagtccagtagcactacgacagatgtcctgtgcggctggtaccacacaaacagcttgtactgatgacaatgcacttgcctactataacaattcgaagggaggtaggtttgtgctggcattactatcagaccaccaagatctcaaatgggctagattccctaagagtgatggtacaggtacaatttacacagaactggaaccaccttgtaggtttgttacagacacaccaaaagggcctaaagtgaaatacttgtacttcatcaaaggcttaaacaacctaaatagaggtatggtgctgggcagtttagctgctacagtacgtcttcaggctggaaatgctacagaagtacctgccaattcaactgtgctttccttctgtgcttttgcagtagaccctgctaaagcatataaggattacctagcaagtggaggacaaccaatcaccaactgtgtgaagatgttgtgtacacacactggtacaggacaggcaattactgtaacaccagaagctaacatggaccaagagtcctttggtggtgcttcatgttgtctgtattgtagatgccacattgaccatccaaatcctaaaggattctgtgacttgaaaggtaagtacgtccaaatacctaccacttgtgctaatgacccagtgggttttacacttagaaacacagtctgtaccgtctgcggaatgtggaaaggttatggctgtagttgtgaccaactccgcgaacccttgatgcagtctgcggatgcatcaacgtttttaaacgggtttgcggtgtaagtgcagcccgtcttacaccgtgcggcacaggcactagtactgatgtcgtctacagggcttttgatatttacaacgaaaaaagtgctggttttgcaaagttcctaaaaactaattgctgtcgcttccaggagaaggatgaggaaggcaatttattagactcttactttgtagttaagaggcatactatgtctaactaccaacatgaagagactatttataacttggttaaagattgtccagcggttgctgtccatgactttttcaagtttagagtagatggtgacatggtaccacatatatcacgtcagcgtctaactaaatacacaatggctgatttagtctatgctctacgtcattttgatgagggtaattgtgatacattaaaagaaatactcgtcacatacaattgctgtgatgatgattatttcaataagaaggattggtatgacttcgtagagaatcctgacatcttacgcgtatatgctaacttaggtgagcgtgtacgccaatcattattaaagactgtacaattctgcgatgctatgcgtgatgcaggcattgtaggcgtactgacattagataatcaggatcttaatgggaactggtacgatttcggtgatttcgtacaagtagcaccaggctgcggagttcctattgtggattcatattactcattgctgatgcccatcctcactttgactagggcattggctgctgagtcccatatggatgctgatctcgcaaaaccacttattaagtgggatttgctgaaatatgattttacggaagagagactttgtctcttcgaccgttattttaaatattgggaccagacataccatcccaattgtattaactgtttggatgataggtgtatccttcattgtgcaaactttaatgtgttattttctactgtgtttccacctacaagttttggaccactagtaagaaaaatatttgtagatggtgttccttttgttgtttcaactggataccattttcgtgagttaggagtcgtacataatcaggatgtaaacttacatagctcgcgtctcagtttcaaggaacttttagtgtatgctgctgatccagctatgcatgcagcttctggcaatttattgctagataaacgcactacatgcttttcagtagctgcactaacaaacaatgttgcttttcaaactgtcaaacccggtaattttaataaagacttttatgactttgctgtgtctaaaggtttctttaaggaaggaagttctgttgaactaaaacacttcttctttgctcaggatggcaacgctgctatcagtgattatgactattatcgttataatctgccaacaatgtgtgatatcagacaactcctattcgtagttgaagttgttgataaatactttgattgttacgatggtggctgtattaatgccaaccaagtaatcgttaacaatctggataaatcagctggtttcccatttaataaatggggtaaggctagactttattatgactcaatgagttatgaggatcaagatgcacttttcgcgtatactaagcgtaatgtcatccctactataactcaaatgaatcttaagtatgccattagtgcaaagaatagagctcgcaccgtagctggtgtctctatctgtagtactatgacaaatagacagtttcatcagaaattattgaagtcaatagccgccactagaggagctactgtggtaattggaacaagcaagttttacggtggctggcataatatgttaaaaactgtttacagtgatgtagaaactccacaccttatgggttgggattatccaaaatgtgacagagccatgcctaacatgcttaggataatggcctctcttgttcttgctcgcaaacataacacttgctgtaacttatcacaccgtttctacaggttagctaacgagtgtgcgcaagtattaagtgagatggtcatgtgtggcggctcactatatgttaaaccaggtggaacatcatccggtgatgctacaactgcttatgctaatagtgtctttaacatttgtcaagctgttacagccaatgtaaatgcacttctttcaactgatggtaataagatagctgacaagtatgtccgcaatctacaacacaggctctatgagtgtctctatagaaatagggatgttgatcatgaattcgtggatgagttttacgcttacctgcgtaaacatttctccatgatgattctttctgatgatgccgttgtgtgctataacagtaactatgcggctcaaggtttagtagctagcattaagaactttaaggcagttctttattatcaaaataatgtgttcatgtctgaggcaaaatgttggactgagactgaccttactaaaggacctcacgaattttgctcacagcatacaatgctagttaaacaaggagatgattacgtgtacctgccttacccagatccatcaagaatattaggcgcaggctgttttgtcgatgatattgtcaaaacagatggtacacttatgattgaaaggttcgtgtcactggctattgatgcttacccacttacaaaacatcctaatcaggagtatgctgatgtctttcacttgtatttacaatacattagaaagttacatgatgagcttactggccacatgttggacatgtattccgtaatgctaactaatgataacacctcacggtactgggaacctgagttttatgaggctatgtacacaccacatacagtcttgcaggctgtaggtgcttgtgtattgtgcaattcacagacttcacttcgttgcggtgcctgtattaggagaccattcctatgttgcaagtgctgctatgaccatgtcatttcaacatcacacaaattagtgttgtctgttaatccctatgtttgcaatgccccaggttgtgatgtcactgatgtgacacaactgtatctaggaggtatgagctattattgcaagtcacataagcctcccattagttttccattatgtgctaatggtcaggtttttggtttatacaaaaacacatgtgtaggcagtgacaatgtcactgacttcaatgcgatagcaacatgtgattggactaatgctggcgattacatacttgccaacacttgtactgagagactcaagcttttcgcagcagaaacgctcaaagccactgaggaaacatttaagctgtcatatggtattgccactgtacgcgaagtactctctgacagagaattgcatctttcatgggaggttggaaaacctagaccaccattgaacagaaactatgtctttactggttaccgtgtaactaaaaatagtaaagtacagattggagagtacacctttgaaaaaggtgactatggtgatgctgttgtgtacagaggtactacgacatacaagttgaatgttggtgattactttgtgttgacatctcacactgtaatgccacttagtgcacctactctagtgccacaagagcactatgtgagaattactggcttgtacccaacactcaacatctcagatgagttttctagcaatgttgcaaattatcaaaaggtcggcatgcaaaagtactctacactccaaggaccacctggtactggtaagagtcattttgccatcggacttgctctctattacccatctgctcgcatagtgtatacggcatgctctcatgcagctgttgatgccctatgtgaaaaggcattaaaatatttgcccatagataaatgtagtagaatcatacctgcgcgtgcgcgcgtagagtgttttgataaattcaaagtgaattcaacactagaacagtatgttttctgcactgtaaatgcattgccagaaacaactgctgacattgtagtctttgatgaaatctctatggctactaattatgacttgagtgttgtcaatgctagacttcgtgcaaaacactacgtctatattggcgatcctgctcaattaccagccccccgcacattgctgactaaaggcacactagaaccagaatattttaattcagtgtgcagacttatgaaaacaataggtccagacatgttccttggaacttgtcgccgttgtcctgctgaaattgttgacactgtgagtgctttagtttatgacaataagctaaaagcacacaaggataagtcagctcaatgcttcaaaatgttctacaaaggtgttattacacatgatgtttcatctgcaatcaacagacctcaaataggcgttgtaagagaatttcttacacgcaatcctgcttggagaaaagctgtttttatctcaccttataattcacagaacgctgtagcttcaaaaatcttaggattgcctacgcagactgttgattcatcacagggttctgaatatgactatgtcatattcacacaaactactgaaacagcacactcttgtaatgtcaaccgcttcaatgtggctatcacaagggcaaaaattggcattttgtgcataatgtctgatagagatctttatgacaaactgcaatttacaagtctagaaataccacgtcgcaatgtggctacattacaagcagaaaatgtaactggactttttaaggactgtagtaagatcattactggtcttcatcctacacaggcacctacacacctcagcgttgatataaaattcaagactgaaggattatgtgttgacataccaggcataccaaaggacatgacctaccgtagactcatctctatgatgggtttcaaaatgaattaccaagtcaatggttaccctaatatgtttatcacccgcgaagaagctattcgtcacgttcgtgcgtggattggctttgatgtagagggctgtcatgcaactagagatgctgtgggtactaacctacctctccagctaggattttctacaggtgttaacttagtagctgtaccgactggttatgttgacactgaaaataacacagaattcaccagagttaatgcaaaacctccaccaggtgaccagtttaaacatcttataccactcatgtataaaggcttgccctggaatgtagtgcgtattaagatagtacaaatgctcagtgatacactgaaaggattgtcagacagagtcgtgttcgtcctttgggcgcatggctttgagcttacatcaatgaagtactttgtcaagattggacctgaaagaacgtgttgtctgtgtgacaaacgtgcaacttgcttttctacttcatcagatacttatgcctgctggaatcattctgtgggttttgactatgtctataacccatttatgattgatgttcagcagtggggctttacgggtaaccttcagagtaaccatgaccaacattgccaggtacatggaaatgcacatgtggctagttgtgatgctatcatgactagatgtttagcagtccatgagtgctttgttaagcgcgttgattggtctgttgaataccctattataggagatgaactgagggttaattctgcttgcagaaaagtacaacacatggttgtgaagtctgcattgcttgctgataagtttccagttcttcatgacattggaaatccaaaggctatcaagtgtgtgcctcaggctgaagtagaatggaagttctacgatgctcagccatgtagtgacaaagcttacaaaatagaggaactcttctattcttatgctacacatcacgataaattcactgatggtgtttgtttgttttggaattgtaacgttgatcgttacccagccaatgcaattgtgtgtaggtttgacacaagagtcttgtcaaacttgaacttaccaggctgtgatggtggtagtttgtatgtgaataagcatgcattccacactccagctttcgataaaagtgcatttactaatttaaagcaattgcctttcttttactattctgatagtccttgtgagtctcatggcaaacaagtagtgtcggatattgattatgttccactcaaatctgctacgtgtattacacgatgcaatttaggtggtgctgtttgcagacaccatgcaaatgagtaccgacagtacttggatgcatataatatgatgatttctgctggatttagcctatggatttacaaacaatttgatacttataacctgtggaatacatttaccaggttacagagtttagaaaatgtggcttataatgttgttaataaaggacactttgatggacacgccggcgaagcacctgtttccatcattaataatgctgtttacacaaaggtagatggtattgatgtggagatctttgaaaataagacaacacttcctgttaatgttgcatttgagctttgggctaagcgtaacattaaaccagtgccagagattaagatactcaataatttgggtgttgatatcgctgctaatactgtaatctgggactacaaaagagaagccccagcacatgtatctacaataggtgtctgcacaatgactgacattgccaagaaacctactgagagtgcttgttcttcacttactgtcttgtttgatggtagagtggaaggacaggtagacctttttagaaacgcccgtaatggtgttttaataacagaaggttcagtcaaaggtctaacaccttcaaagggaccagcacaagctagcgtcaatggagtcacattaattggagaatcagtaaaaacacagtttaactactttaagaaagtagacggcattattcaacagttgcctgaaacctactttactcagagcagagacttagaggattttaagcccagatcacaaatggaaactgactttctcgagctcgctatggatgaattcatacagcgatataagctcgagggctatgccttcgaacacatcgtttatggagatttcagtcatggacaacttggcggtcttcatttaatgataggcttagccaagcgctcacaagattcaccacttaaattagaggattttatccctatggacagcacagtgaaaaattacttcataacagatgcgcaaacaggttcatcaaaatgtgtgtgttctgtgattgatcttttacttgatgactttgtcgagataataaagtcacaagatttgtcagtgatttcaaaagtggtcaaggttacaattgactatgctgaaatttcattcatgctttggtgtaaggatggacatgttgaaaccttctacccaaaactacaagcaagtcaagcgtggcaaccaggtgttgcgatgcctaacttgtacaagatgcaaagaatgcttcttgaaaagtgtgaccttcagaattatggtgaaaatgctgttataccaaaaggaataatgatgaatgtcgcaaagtatactcaactgtgtcaatacttaaatacacttactttagctgtaccctacaacatgagagttattcactttggtgctggctctgataaaggagttgcaccaggtacagctgtgctcagacaatggttgccaactggcacactacttgtcgattcagatcttaatgacttcgtctccgacgcagattctactttaattggagactgtgcaacagtacatacggctaataaatgggaccttattattagcgatatgtatgaccctaggaccaaacatgtgacaaaagagaatgactctaaagaagggtttttcacttatctgtgtggatttataaagcaaaaactagccctgggtggttctatagctgtaaagataacagagcattcttggaatgctgacctttacaagcttatgggccatttctcatggtggacagcttttgttacaaatgtaaatgcatcatcatcggaagcatttttaattggggctaactatcttggcaagccgaaggaacaaattgatggctataccatgcatgctaactacattttctggaggaacacaaatcctatccagttgtcttcctattcactctttgacatgagcaaatttcctcttaaattaagaggaactgctgtaatgtctcttaaggagaatcaaatcaatgatatgatttattctcttctggaaaaaggtaggcttatcattagagaaaacaacagagttgtggtttcaagtgatattcttgttaacaactaaacgaacatgtttattttcttattatttcttactctcactagtggtagtgaccttgaccggtgcaccacttttgatgatgttcaagctcctaattacactcaacatacttcatctatgaggggggtttactatcctgatgaaatttttagatcagacactctttatttaactcaggatttatttcttccattttattctaatgttacagggtttcatactattaatcatacgtttggcaaccctgtcataccttttaaggatggtatttattttgctgccacagagaaatcaaatgttgtccgtggttgggtttttggttctaccatgaacaacaagtcacagtcggtgattattattaacaattctactaatgttgttatacgagcatgtaactttgaattgtgtgacaaccctttctttgctgtttctaaacccatgggtacacagacacatactatgatattcgataatgcatttaattgcactttcgagtacatatctgatgccttttcgcttgatgtttcagaaaagtcaggtaattttaaacacttacgagagtttgtgtttaaaaataaagatgggtttctctatgtttataagggctatcaacctatagatgtagttcgtgatctaccttctggttttaacactttgaaacctatttttaagttgcctcttggtattaacattacaaattttagagccattcttacagccttttcacctgctcaagacatttggggcacgtcagctgcagcctattttgttggctatttaaagccaactacatttatgctcaagtatgatgaaaatggtacaatcacagatgctgttgattgttctcaaaatccacttgctgaactcaaatgctctgttaagagctttgagattgacaaaggaatttaccagacctctaatttcagggttgttccctcaggagatgttgtgagattccctaatattacaaacttgtgtccttttggagaggtttttaatgctactaaattcccttctgtctatgcatgggagagaaaaaaaatttctaattgtgttgctgattactctgtgctctacaactcaacatttttttcaacctttaagtgctatggcgtttctgccactaagttgaatgatctttgcttctccaatgtctatgcagattcttttgtagtcaagggagatgatgtaagacaaatagcgccaggacaaactggtgttattgctgattataattataaattgccagatgatttcatgggttgtgtccttgcttggaatactaggaacattgatgctacttcaactggtaattataattataaatataggtatcttagacatggcaagcttaggccctttgagagagacatatctaatgtgcctttctcccctgatggcaaaccttgcaccccacctgctcttaattgttattggccattaaatgattatggtttttacaccactactggcattggctaccaaccttacagagttgtagtactttcttttgaacttttaaatgcaccggccacggtttgtggaccaaaattatccactgaccttattaagaaccagtgtgtcaattttaattttaatggactcactggtactggtgtgttaactccttcttcaaagagatttcaaccatttcaacaatttggccgtgatgtttctgatttcactgattccgttcgagatcctaaaacatctgaaatattagacatttcaccttgctcttttgggggtgtaagtgtaattacacctggaacaaatgcttcatctgaagttgctgttctatatcaagatgttaactgcactgatgtttctacagcaattcatgcagatcaactcacaccagcttggcgcatatattctactggaaacaatgtattccagactcaagcaggctgtcttataggagctgagcatgtcgacacttcttatgagtgcgacattcctattggagctggcatttgtgctagttaccatacagtttctttattacgtagtactagccaaaaatctattgtggcttatactatgtctttaggtgctgatagttcaattgcttactctaataacaccattgctatacctactaacttttcaattagcattactacagaagtaatgcctgtttctatggctaaaacctccgtagattgtaatatgtacatctgcggagattctactgaatgtgctaatttgcttctccaatatggtagcttttgcacacaactaaatcgtgcactctcaggtattgctgctgaacaggatcgcaacacacgtgaagtgttcgctcaagtcaaacaaatgtacaaaaccccaactttgaaatattttggtggttttaatttttcacaaatattacctgaccctctaaagccaactaagaggtcttttattgaggacttgctctttaataaggtgacactcgctgatgctggcttcatgaagcaatatggcgaatgcctaggtgatattaatgctagagatctcatttgtgcgcagaagttcaatggacttacagtgttgccacctctgctcactgatgatatgattgctgcctacactgctgctctagttagtggtactgccactgctggatggacatttggtgctggcgctgctcttcaaataccttttgctatgcaaatggcatataggttcaatggcattggagttacccaaaatgttctctatgagaaccaaaaacaaatcgccaaccaatttaacaaggcgattagtcaaattcaagaatcacttacaacaacatcaactgcattgggcaagctgcaagacgttgttaaccagaatgctcaagcattaaacacacttgttaaacaacttagctctaattttggtgcaatttcaagtgtgctaaatgatatcctttcgcgacttgataaagtcgaggcggaggtacaaattgacaggttaattacaggcagacttcaaagccttcaaacctatgtaacacaacaactaatcagggctgctgaaatcagggcttctgctaatcttgctgctactaaaatgtctgagtgtgttcttggacaatcaaaaagagttgacttttgtggaaagggctaccaccttatgtccttcccacaagcagccccgcatggtgttgtcttcctacatgtcacgtatgtgccatcccaggagaggaacttcaccacagcgccagcaatttgtcatgaaggcaaagcatacttccctcgtgaaggtgtttttgtgtttaatggcacttcttggtttattacacagaggaacttcttttctccacaaataattactacagacaatacatttgtctcaggaaattgtgatgtcgttattggcatcattaacaacacagtttatgatcctctgcaacctgagcttgactcattcaaagaagagctggacaagtacttcaaaaatcatacatcaccagatgttgatcttggcgacatttcaggcattaacgcttctgtcgtcaacattcaaaaagaaattgaccgcctcaatgaggtcgctaaaaatttaaatgaatcactcattgaccttcaagaattgggaaaatatgagcaatatattaaatggccttggtatgtttggctcggcttcattgctggactaattgccatcgtcatggttacaatcttgctttgttgcatgactagttgttgcagttgcctcaagggtgcatgctcttgtggttcttgctgcaagtttgatgaggatgactctgagccagttctcaagggtgtcaaattacattacacataaacgaacttatggatttgtttatgagattttttactcttggatcaattactgcacagccagtaaaaattgacaatgcttctcctgcaagtactgttcatgctacagcaacgataccgctacaagcctcactccctttcggatggcttgttattggcgttgcatttcttgctgtttttcagagcgctaccaaaataattgcgctcaataaaagatggcagctagccctttataagggcttccagttcatttgcaatttactgctgctatttgttaccatctattcacatcttttgcttgtcgctgcaggtaaggaggcgcaatttttgtacctctatgccttgatatattttctacaatgcatcaacgcatgtagaattattatgagatgttggctttgttggaagtgcaaatccaagaacccattactttatgatgccaactactttgtttgctggcacacacataactatgactactgtataccatataacagtgtcacagatacaattgtcgttactgaaggtgacggcatttcaacaccaaaactcaaagaagactaccaaattggtggttattctgaggataggcactcaggtgttaaagactatgtcgttgtacatggctatttcaccgaagtttactaccagcttgagtctacacaaattactacagacactggtattgaaaatgctacattcttcatctttaacaagcttgttaaagacccaccgaatgtgcaaatacacacaatcgacggctcttcaggagttgctaatccagcaatggatccaatttatgatgagccgacgacgactactagcgtgcctttgtaagcacaagaaagtgagtacgaacttatgtactcattcgtttcggaagaaacaggtacgttaatagttaatagcgtacttctttttcttgctttcgtggtattcttgctagtcacactagccatccttactgcgcttcgattgtgtgcgtactgctgcaatattgttaacgtgagtttagtaaaaccaacggtttacgtctactcgcgtgttaaaaatctgaactcttctgaaggagttcctgatcttctggtctaaacgaactaactattattattattctgtttggaactttaacattgcttatcatggcagacaacggtactattaccgttgaggagcttaaacaactcctggaacaatggaacctagtaataggtttcctattcctagcctggattatgttactacaatttgcctattctaatcggaacaggtttttgtacataataaagcttgttttcctctggctcttgtggccagtaacacttgcttgttttgtgcttgctgttgtctacagaattaattgggtgactggcgggattgcgattgcaatggcttgtattgtaggcttgatgtggcttagctacttcgttgcttccttcaggctgtttgctcgtacccgctcaatgtggtcattcaacccagaaacaaacattcttctcaatgtgcctctccgggggacaattgtgaccagaccgctcatggaaagtgaacttgtcattggtgctgtgatcattcgtggtcacttgcgaatggccggacactccctagggcgctgtgacattaaggacctgccaaaagagatcactgtggctacatcacgaacgctttcttattacaaattaggagcgtcgcagcgtgtaggcactgattcaggttttgctgcatacaaccgctaccgtattggaaactataaattaaatacagaccacgccggtagcaacgacaatattgctttgctagtacagtaagtgacaacagatgtttcatcttgttgacttccaggttacaatagcagagatattgattatcattatgaggactttcaggattgctatttggaatcttgacgttataataagttcaatagtgagacaattatttaagcctctaactaagaagaattattcggagttagatgatgaagaacctatggagttagattatccataaaacgaacatgaaaattattctcttcctgacattgattgtatttacatcttgcgagctatatcactatcaggagtgtgttagaggtacgactgtactactaaaagaaccttgcccatcaggaacatacgagggcaattcaccatttcaccctcttgctgacaataaatttgcactaacttgcactagcacacactttgcttttgcttgtgctgacggtactcgacatacctatcagctgcgtgcaagatcagtttcaccaaaacttttcatcagacaagaggaggttcaacaagagctctactcgccactttttctcattgttgctgctctagtatttttaatactttgcttcaccattaagagaaagacagaatgaatgagctcactttaattgacttctatttgtgctttttagcctttctgctattccttgttttaataatgcttattatattttggttttcactcgaaatccaggatctagaagaaccttgtaccaaagtctaaacgaacatgaaacttctcattgttttgacttgtatttctctatgcagttgcatatgcactgtagtacagcgctgtgcatctaataaacctcatgtgcttgaagatccttgtaaggtacaacactaggggtaatacttatagcactgcttggctttgtgctctaggaaaggttttaccttttcatagatggcacactatggttcaaacatgcacacctaatgttactatcaactgtcaagatccagctggtggtgcgcttatagctaggtgttggtaccttcatgaaggtcaccaaactgctgcatttagagacgtacttgttgttttaaataaacgaacaaattaaaatgtctgataatggaccccaatcaaaccaacgtagtgccccccgcattacatttggtggacccacagattcaactgacaataaccagaatggaggacgcaatggggcaaggccaaaacagcgccgaccccaaggtttacccaataatactgcgtcttggttcacagctctcactcagcatggcaaggaggaacttagattccctcgaggccagggcgttccaatcaacaccaatagtggtccagatgaccaaattggctactaccgaagagctacccgacgagttcgtggtggtgacggcaaaatgaaagagctcagccccagatggtacttctattacctaggaactggcccagaagcttcacttccctacggcgctaacaaagaaggcatcgtatgggttgcaactgagggagccttgaatacacccaaagaccacattggcacccgcaatcctaataacaatgctgccaccgtgctacaacttcctcaaggaacaacattgccaaaaggcttctacgcagagggaagcagaggcggcagtcaagcctcttctcgctcctcatcacgtagtcgcggtaattcaagaaattcaactcctggcagcagtaggggaaattctcctgctcgaatggctagcggaggtggtgaaactgccctcgcgctattgctgctagacagattgaaccagcttgagagcaaagtttctggtaaaggccaacaacaacaaggccaaactgtcactaagaaatctgctgctgaggcatctaaaaagcctcgccaaaaacgtactgccacaaaacagtacaacgtcactcaagcatttgggagacgtggtccagaacaaacccaaggaaatttcggggaccaagacctaatcagacaaggaactgattacaaacattggccgcaaattgcacaatttgctccaagtgcctctgcattctttggaatgtcacgcattggcatggaagtcacaccttcgggaacatggctgacttatcatggagccattaaattggatgacaaagatccacaattcaaagacaacgtcatactgctgaacaagcacattgacgcatacaaaacattcccaccaacagagcctaaaaaggacaaaaagaaaaagactgatgaagctcagcctttgccgcagagacaaaagaagcagcccactgtgactcttcttcctgcggctgacatggatgatttctccagacaacttcaaaattccatgagtggagcttctgctgattcaactcaggcataaacactcatgatgaccacacaaggcagatgggctatgtaaacgttttcgcaattccgtttacgatacatagtctactcttgtgcagaatgaattctcgtaactaaacagcacaagtaggtttagttaactttaatctcacatagcaatctttaatcaatgtgtaacattagggaggacttgaaagagccaccacattttcatcgaggccacgcggagtacgatcgagggtacagtgaataatgctagggagagctgcctatatggaagagccctaatgtgtaaaattaattttagtagtgctatccccatgtgattttaatagcttcttaggagaatgacaaaaaaaaaaaaaaa

SEQ ID NO: 710 - protein, 21 aa, SARS-CoV Virus
ILGFYLPRKSQPTSISCRSVL

SEQ ID NO: 711 - protein, 14 aa, SARS-CoV Virus
TNFKICVAVARLHA

SEQ ID NO: 712 - protein, 5 aa, SARS-CoV Virus
CTYAV

SEQ ID NO: 713 - protein, 40 aa, SARS-CoV Virus
TIINFTVVDKKRVTRPSSADCLRFRPCCSRSSAYLGFVRV

SEQ ID NO: 714 - protein, 4386 aa, SARS-CoV Virus
PKGKMESLVLGVNEKTHVQLSLPVLQVRDVLVRGFGDSVEEALSEAREHLKNGTCGLVELEKGVLPQLEQPYVFIKRSDALSTNHGHKVVELVAEMDGIQYGRSGITLGVLVPHVGETPIAYRNVLLRKNGNKGAGGHSYGIDLKSYDLGDELGTDPIEDYEQNWNTKHGSGALRELTRELNGGAVTRYVDNNFCGPDGYPLDCIKDFLARAGKSMCTLSEQLDYIESKRGVYCCRDHEHEIAWFTERSDKSYEHQTPFEIKSAKKFDTFKGECPKFVFPLNSKVKVIQPRVEKKKTEGFMGRIRSVYPVASPQECNNMHLSTLMKCNHCDEVSWQTCDFLKATCEHCGTENLVIEGPTTCGYLPTNAVVKMPCPACQDPEIGPEHSVADYHNHSNIETRLRKGGRTRCFGGCVFAYVGCYNKRAYWVPRASADIGSGHTGITGDNVETLNEDLLEILSRERVNINIVGDFHLNEEVAIILASFSASTSAFIDTIKSLDYKSFKTIVESCGNYKVTKGKPVKGAWNIGQQRSVLTPLCGFPSQAAGVIRSIFARTLDAANHSIPDLQRAAVTILDGISEQSLRLVDAMVYTSDLLTNSVIIMAYVTGGLVQQTSQWLSNLLGTTVEKLRPIFEWIEAKLSAGVEFLKDAWEILKFLITGVFDIVKGQIQVASDNIKDCVKCFIDVVNKALEMCIDQVTIAGAKLRSLNLGEVFIAQSKGLYRQCIRGKEQLQLLMPLKAPKEVTFLEGDSHDTVLTSEEVVLKNGELEALETPVDSFTNGAIVGTPVCVNGLMLLEIKDKEQYCALSPGLLATNNVFRLKGGAPIKGVTFGEDTVWEVQGYKNVRITFELDERVDKVLNEKCSVYTVESGTEVTEFACVVAEAVVKTLQPVSDLLTNMGIDLDEWSVATFYLFDDAGEENFSSRMYCSFYPPDEEEEDDAECEEEEIDETCEHEYGTEDDYQGLPLEFGASAETVRVEEEEEEDWLDDTTEQSEIEPEPEPTPEEPVNQFTGYLKLTDNVAIKCVDIVKEAQSANPMVIVNAANIHLKHGGGVAGALNKATNGAMQKESDDYIKLNGPLTVGGSCLLSGHNLAKKCLHVVGPNLNAGEDIQLLKAAYENFNSQDILLAPLLSAGIFGAKPLQSLQVCVQTVRTQVYIAVNDKALYEQVVMDYLDNLKPRVEAPKQEEPPNTEDSKTEEKSVVQKPVDVKPKIKACIDEVTTTLEETKFLTNKLLLFADINGKLYHDSQNMLRGEDMSFLEKDAPYMVGDVITSGDITCVVIPSKKAGGTTEMLSRALKKVPVDEYITTYPGQGCAGYTLEEAKTALKKCKSAFYVLPSEAPNAKEEILGTVSWNLREMLAHAEETRKLMPICMDVRAIMATIQRKYKGIKIQEGIVDYGVRFFFYTSKEPVASIITKLNSLNEPLVTMPIGYVTHGFNLEEAARCMRSLKAPAVVSVSSPDAVTTYNGYLTSSSKTSEEHFVETVSLAGSYRDWSYSGQRTELGVEFLKRGDKIVYHTLESPVEFHLDGEVLSLDKLKSLLSLREVKTIKVFTTVDNTNLHTQLVDMSMTYGQQFGPTYLDGADVTKIKPHVNHEGKTFFVLPSDDTLRSEAFEYYHTLDESFLGRYMSALNHTKKWKFPQVGGLTSIKWADNNCYLSSVLLALQQLEVKFNAPALQEAYYRARAGDAANFCALILAYSNKTVGELGDVRETMTHLLQHANLESAKRVLNVVCKHCGQKTTTLTGVEAVMYMGTLSYDNLKTGVSIPCVCGRDATQYLVQQESSFVMMSAPPAEYKLQQGTFLCANEYTGNYQCGHYTHITAKETLYRIDGAHLTKMSEYKGPVTDVFYKETSYTTTIKPVSYKLDGVTYTEIEPKLDGYYKKDNAYYTEQPIDLVPTQPLPNASFDNFKLTCSNTKFADDLNQMTGFTKPASRELSVTFFPDLNGDVVAIDYRHYSASFKKGAKLLHKPIVWHINQATTKTTFKPNTWCLRCLWSTKPVDTSNSFEVLAVEDTQGMDNLACESQQPTSEEVVENPTIQKEVIECDVKTTEVVGNVILKPSDEGVKVTQELGHEDLMAAYVENTSITIKKPNELSLALGLKTIATHGIAAINSVPWSKILAYVKPFLGQAAITTSNCAKRLAQRVFNNYMPYVFTLLFQLCTFTKSTNSRIRASLPTTIAKNSVKSVAKLCLDAGINYVKSPKFSKLFTIAMWLLLLSICLGSLICVTAAFGVLLSNFGAPSYCNGVRELYLNSSNVTTMDFCEGSFPCSICLSGLDSLDSYPALETIQVTISSYKLDLTILGLAAEWVLAYMLFTKFFYLLGLSAIMQVFFGYFASHFISNSWLMWFIISIVQMAPVSAMVRMYIFFASFYYIWKSYVHIMDGCTSSTCMMCYKRNRATRVECTTIVNGMKRSFYVYANGGRGFCKTHNWNCLNCDTFCTGSTFISDEVARDLSLQFKRPINPTDQSSYIVDSVAVKNGALHLYFDKAGQKTYERHPLSHFVNLDNLRANNTKGSLPINVIVFDGKSKCDESASKSASVYYSQLMCQPILLLDQALVSNVGDSTEVSVKMFDAYVDTFSATFSVPMEKLKALVATAHSELAKGVALDGVLSTFVSAARQGVVDTDVDTKDVIECLKLSHHSDLEVTGDSCNNFMLTYNKVENMTPRDLGACIDCNARHINAQVAKSHNVSLIWNVKDYMSLSEQLRKQIRTAAKKNNIPFTLTCATTRQVVNVITTKISLKGGKIVSTCFKLMLKATLLCVLAALVCYIVMPVHTLSIHDGYTNEIIGYKAIQDGVTRDIISTDDCFANKHAGFDAWFSQRGGSYKNDKSCPVVAAIITREIGFIVPGLPGTVLRAINGDFLHFLPRVFSAVGNICYTPSKLIEYSDFATSACVLAAECTIFKDAMGKPVPYCYDTNLLEGSISYSELRPDTRYVLMDGSIIQFPNTYLEGSVRVVTTFDAEYCRHGTCERSEVGICLSTSGRWVLNNEHYRALSGVFCGVDAMNLIANIFTPLVQPVGALDVSASVVAGGIIAILVTCAAYYFMKFRRVFGEYNHVVAANALLFLMSFTILCLVPAYSFLPGVYSVFYLYLTFYFTNDVSFLAHLQWFAMFSPIVPFWITAIYVFCISLKHCHWFFNNYLRKRVMFNGVTFSTFEEAALCTFLLNKEMYLKLRSETLLPLTQYNRYLALYNKYKYFSGALDTTSYREAACCHLAKALNDFSNSGADVLYQPPQTSITSAVLQSGFRKMAFPSGKVEGCMVQVTCGTTTLNGLWLDDTVYCPRHVICTAEDMLNPNYEDLLIRKSNHSFLVQAGNVQLRVIGHSMQNCLLRLKVDTSNPKTPKYKFVRIQPGQTFSVLACYNGSPSGVYQCAMRPNHTIKGSFLNGSCGSVGFNIDYDCVSFCYMHHMELPTGVHAGTDLEGKFYGPFVDRQTAQAAGTDTTITLNVLAWLYAAVINGDRWFLNRFTTTLNDFNLVAMKYNYEPLTQDHVDILGPLSAQTGIAVLDMCAALKELLQNGMNGRTILGSTILEDEFTPFDVVRQCSGVTFQGKFKKIVKGTHHWMLLTFLTSLLILVQSTQWSLFFFVYENAFLPFTLGIMAIAACAMLLVKHKHAFLCLFLLPSLATVAYFNMVYMPASWVMRIMTWLELADTSLSGYRLKDCVMYASALVLLILMTARTVYDDAARRVWTLMNVITLVYKVYYGNALDQAISMWALVISVTSNYSGVVTTIMFLARAIVFVCVEYYPLLFITGNTLQCIMLVYCFLGYCCCCYFGLFCLLNRYFRLTLGVYDYLVSTQEFRYMNSQGLLPPKSSIDAFKLNIKLLGIGGKPCIKVATVQSKMSDVKCTSVVLLSVLQQLRVESSSKLWAQCVQLHNDILLAKDTTEAFEKMVSLLSVLLSMQGAVDINRLCEEMLDNRATLQAIASEFSSLPSYAAYATAQEAYEQAVANGDSEVVLKKLKKSLNVAKSEFDRDAAMQRKLEKMADQAMTQMYKQARSEDKRAKVTSAMQTMLFTMLRKLDNDALNNIINNARDGCVPLNIIPLTTAAKLMVVVPDYGTYKNTCDGNTFTYASALWEIQQVVDADSKIVQLSEINMDNSPNLAWPLIVTALRANSAVKLQNNELSPVALRQMSCAAGTTQTACTDDNALAYYNNSKGGRFVLALLSDHQDLKWARFPKSDGTGTIYTELEPPCRFVTDTPKGPKVKYLYFIKGLNNLNRGMVLGSLAATVRLQAGNATEVPANSTVLSFCAFAVDPAKAYKDYLASGGQPITNCVKMLCTHTGTGQAITVTPEANMDQESFGGASCCLYCRCHIDHPNPKGFCDLKGKYVQIPTTCANDPVGFTLRNTVCTVCGMWKGYGCSCDQLREPLMQSADASTFLNGFAV

SEQ ID NO: 715 - protein, 34 aa, SARS-CoV Virus
VQPVLHRAAQALVLMSSTGLLIFTTKKVLVLQSS

SEQ ID NO: 716 - protein, 16 aa, SARS-CoV Virus
KLIAVASRRRMRKAIY

SEQ ID NO: 717 - protein, 4 aa, SARS-CoV Virus
TLTL

SEQ ID NO: 718 - protein, 34 aa, SARS-CoV Virus
LRGILCLTTNMKRLFITWLKIVQRLLSMTFSSLE

SEQ ID NO: 719 - protein, 12 aa, SARS-CoV Virus
MVTWYHIYHVSV

SEQ ID NO: 720 - protein, 7 aa, SARS-CoV Virus
LNTQWLI

SEQ ID NO: 721 - protein, 14 aa, SARS-CoV Virus
SMLYVILMRVIVIH

SEQ ID NO: 722 - protein, 23 aa, SARS-CoV Virus
KKYSSHTIAVMMIISIRRIGMTS

SEQ ID NO: 723 - protein, 11 aa, SARS-CoV Virus
RILTSYAYMLT

SEQ ID NO: 724 - protein, 8 aa, SARS-CoV Virus
VSVYANHY

SEQ ID NO: 725 - protein, 14 aa, SARS-CoV Virus
RLYNSAMLCVMQAL

SEQ ID NO: 726 - protein, 17 aa, SARS-CoV Virus
IIRILMGTGTISVISYK

SEQ ID NO: 727 - protein, 15 aa, SARS-CoV Virus
HQAAEFLLWIHITHC

SEQ ID NO: 728 - protein, 5 aa, SARS-CoV Virus
CPSSL

SEQ ID NO: 729 - protein, 23 aa, SARS-CoV Virus
LGHWLLSPIWMLISQNHLLSGIC

SEQ ID NO: 730 - protein, 57 aa, SARS-CoV Virus
NMILRKRDFVSSTVILNIGTRHTIPIVLTVWMIGVSFIVQTLMCYFLLCFHLQVLDH

SEQ ID NO: 731 - protein, 4 aa, SARS-CoV Virus
EKYL

SEQ ID NO: 732 - protein, 15 aa, SARS-CoV Virus
MVFLLLFQLDTIFVS

SEQ ID NO: 733 - protein, 7 aa, SARS-CoV Virus
ESYIIRM

SEQ ID NO: 734 - protein, 12 aa, SARS-CoV Virus
TYIARVSVSRNF

SEQ ID NO: 735 - protein, 16 aa, SARS-CoV Virus
CMLLIQLCMQLLAIYC

SEQ ID NO: 736 - protein, 8 aa, SARS-CoV Virus
INALHAFQ

SEQ ID NO: 737 - protein, 35 aa, SARS-CoV Virus
QTMLLFKLSNPVILIKTFMTLLCLKVSLRKEVLLN

SEQ ID NO: 738 - protein, 34 aa, SARS-CoV Virus
NTSSLLRMATLLSVIMTIIVIICQQCVISDNSYS

SEQ ID NO: 739 - protein, 20 aa, SARS-CoV Virus
LKLLINTLIVTMVAVLMPTK

SEQ ID NO: 740 - protein, 25 aa, SARS-CoV Virus
SLTIWINQLVSHLINGVRLDFIMTQ

SEQ ID NO: 741 - protein, 19 aa, SARS-CoV Virus
VMRIKMHFSRILSVMSSLL

SEQ ID NO: 742 - protein, 14 aa, SARS-CoV Virus
ILSMPLVQRIELAP

SEQ ID NO: 743 - protein, 8 aa, SARS-CoV Virus
LVSLSVVL

SEQ ID NO: 744 - protein, 9 aa, SARS-CoV Virus
QIDSFIRNY

SEQ ID NO: 745 - protein, 8 aa, SARS-CoV Virus
PPLEELLW

SEQ ID NO: 746 - protein, 13 aa, SARS-CoV Virus
LEQASFTVAGIIC

SEQ ID NO: 747 - protein, 6 aa, SARS-CoV Virus
KLFTVM

SEQ ID NO: 748 - protein, 22 aa, SARS-CoV Virus
KLHTLWVGIIQNVTEPCLTCLG

SEQ ID NO: 749 - protein, 22 aa, SARS-CoV Virus
WPLLFLLANITLAVTYHTVSTG

SEQ ID NO: 750 - protein, 7 aa, SARS-CoV Virus
LTSVRKY

SEQ ID NO: 751 - protein, 40 aa, SARS-CoV Virus
VRWSCVAAHYMLNQVEHHPVMLQLLMLIVSLTFVKLLQPM

SEQ ID NO: 752 - protein, 10 aa, SARS-CoV Virus
MHFFQLMVIR

SEQ ID NO: 753 - protein, 39 aa, SARS-CoV Virus
LTSMSAIYNTGSMSVSIEIGMLIMNSWMSFTLTCVNISP

SEQ ID NO: 754 - protein, 18 aa, SARS-CoV Virus
FFLMMPLCAITVTMRLKV

SEQ ID NO: 755 - protein, 42 aa, SARS-CoV Virus
LALRTLRQFFIIKIMCSCLRQNVGLRLTLLKDLTNFAHSIQC

SEQ ID NO: 756 - protein, 18 aa, SARS-CoV Virus
LNKEMITCTCLTQIHQEY

SEQ ID NO: 757 - protein, 16 aa, SARS-CoV Virus
AQAVLSMILSKQMVHL

SEQ ID NO: 758 - protein, 49 aa, SARS-CoV Virus
LKGSCHWLLMLTHLQNILIRSMLMSFTCIYNTLESYMMSLLATCWTCIP

SEQ ID NO: 759 - protein, 26 aa, SARS-CoV Virus
LMITPHGTGNLSFMRLCTHHIQSCRL

SEQ ID NO: 760 - protein, 38 aa, SARS-CoV Virus
VLVYCAIHRLHFVAVPVLGDHSYVASAAMTMSFQHHTN

SEQ ID NO: 761 - protein, 18 aa, SARS-CoV Virus
CCLLIPMFAMPQVVMSLM

SEQ ID NO: 762 - protein, 4 aa, SARS-CoV Virus
HNCI

SEQ ID NO: 763 - protein, 29 aa, SARS-CoV Virus
AIIASHISLPLVFHYVLMVRFLVYTKTHV

SEQ ID NO: 764 - protein, 10 aa, SARS-CoV Virus
AVTMSLTSMR

SEQ ID NO: 765 - protein, 66 aa, SARS-CoV Virus
QHVIGLMLAITYLPTLVLRDSSFSQQKRSKPLRKHLSCHMVLPLYAKYSLTENCIFHGRLENLDHH

SEQ ID NO: 766 - protein, 10 aa, SARS-CoV Virus
TETMSLLVTV

SEQ ID NO: 767 - protein, 31 aa, SARS-CoV Virus
LKIVKYRLESTPLKKVTMVMLLCTEVLRHTS

SEQ ID NO: 768 - protein, 7 aa, SARS-CoV Virus
MLVITLC

SEQ ID NO: 769 - protein, 4 aa, SARS-CoV Virus
HLTL

SEQ ID NO: 770 - protein, 7 aa, SARS-CoV Virus
CHLVHLL

SEQ ID NO: 771 - protein, 6 aa, SARS-CoV Virus
CHKSTM

SEQ ID NO: 772 - protein, 56 aa, SARS-CoV Virus
ELLACTQHSTSQMSFLAMLQIIKRSACKSTLHSKDHLVLVRVILPSDLLSITHLLA

SEQ ID NO: 773 - protein, 17 aa, SARS-CoV Virus
CIRHALMQLLMPYVKRH

SEQ ID NO: 774 - protein, 4 aa, SARS-CoV Virus
NICP

SEQ ID NO: 775 - protein, 12 aa, SARS-CoV Virus
INVVESYLRVRA

SEQ ID NO: 776 - protein, 7 aa, SARS-CoV Virus
SVLINSK

SEQ ID NO: 777 - protein, 7 aa, SARS-CoV Virus
NSMFSAL

SEQ ID NO: 778 - protein, 10 aa, SARS-CoV Virus
MHCQKQLLTL

SEQ ID NO: 779 - protein, 12 aa, SARS-CoV Virus
SLMKSLWLLIMT

SEQ ID NO: 780 - protein, 27 aa, SARS-CoV Virus
VLSMLDFVQNTTSILAILLNYQPPAHC

SEQ ID NO: 781 - protein, 4 aa, SARS-CoV Virus
LKAH

SEQ ID NO: 782 - protein, 11 aa, SARS-CoV Virus
NQNILIQCADL

SEQ ID NO: 783 - protein, 19 aa, SARS-CoV Virus
VQTCSLELVAVVLLKLLTL

SEQ ID NO: 784 - protein, 5 aa, SARS-CoV Virus
FMTIS

SEQ ID NO: 785 - protein, 31 aa, SARS-CoV Virus
KHTRISQLNASKCSTKVLLHMMFHLQSTDLK

SEQ ID NO: 786 - protein, 24 aa, SARS-CoV Virus
ENFLHAILLGEKLFLSHLIIHRTL

SEQ ID NO: 787 - protein, 4 aa, SARS-CoV Virus
LQKS

SEQ ID NO: 788 - protein, 48 aa, SARS-CoV Virus
DCLRRLLIHHRVLNMTMSYSHKLLKQHTLVMSTASMWLSQGQKLAFCA

SEQ ID NO: 789 - protein, 14 aa, SARS-CoV Virus
CLIEIFMTNCNLQV

SEQ ID NO: 790 - protein, 14 aa, SARS-CoV Virus
KYHVAMWLHYKQKM

SEQ ID NO: 791 - protein, 26 aa, SARS-CoV Virus
LDFLRTVVRSLLVFILHRHLHTSALI

SEQ ID NO: 792 - protein, 17 aa, SARS-CoV Virus
NSRLKDYVLTYQAYQRT

SEQ ID NO: 793 - protein, 7 aa, SARS-CoV Virus
PTVDSSL

SEQ ID NO: 794 - protein, 4 aa, SARS-CoV Virus
WVSK

SEQ ID NO: 795 - protein, 28 aa, SARS-CoV Virus
ITKSMVTLICLSPAKKLFVTFVRGLALM

SEQ ID NO: 796 - protein, 17 aa, SARS-CoV Virus
RAVMQLEMLWVLTYLSS

SEQ ID NO: 797 - protein, 7 aa, SARS-CoV Virus
DFLQVLT

SEQ ID NO: 798 - protein, 42 aa, SARS-CoV Virus
LYRLVMLTLKITQNSPELMQNLHQVTSLNILYHSCIKACPGM

SEQ ID NO: 799 - protein, 4 aa, SARS-CoV Virus
CVLR

SEQ ID NO: 800 - protein, 7 aa, SARS-CoV Virus
YKCSVIH

SEQ ID NO: 801 - protein, 20 aa, SARS-CoV Virus
KDCQTESCSSFGRMALSLHQ

SEQ ID NO: 802 - protein, 45 aa, SARS-CoV Virus
STLSRLDLKERVVCVTNVQLAFLLHQILMPAGIILWVLTMSITHL

SEQ ID NO: 803 - protein, 34 aa, SARS-CoV Virus
LMFSSGALRVTFRVTMTNIARYMEMHMWLVVMLS

SEQ ID NO: 804 - protein, 18 aa, SARS-CoV Virus
QSMSALLSALIGLLNTLL

SEQ ID NO: 805 - protein, 13 aa, SARS-CoV Virus
GLILLAEKYNTWL

SEQ ID NO: 806 - protein, 28 aa, SARS-CoV Virus
SLHCLLISFQFFMTLEIQRLSSVCLRLK

SEQ ID NO: 807 - protein, 16 aa, SARS-CoV Virus
NGSSTMLSHVVTKLTK

SEQ ID NO: 808 - protein, 45 aa, SARS-CoV Virus
RNSSILMLHITINSLMVFVCFGIVTLIVTQPMQLCVGLTQESCQT

SEQ ID NO: 809 - protein, 11 aa, SARS-CoV Virus
TYQAVMVVVCM

SEQ ID NO: 810 - protein, 17 aa, SARS-CoV Virus
ISMHSTLQLSIKVHLLI

SEQ ID NO: 811 - protein, 19 aa, SARS-CoV Virus
SNCLSFTILIVLVSLMANK

SEQ ID NO: 812 - protein, 19 aa, SARS-CoV Virus
CRILIMFHSNLLRVLHDAI

SEQ ID NO: 813 - protein, 20 aa, SARS-CoV Virus
VVLFADTMQMSTDSTWMHII

SEQ ID NO: 814 - protein, 27 aa, SARS-CoV Virus
FLLDLAYGFTNNLILITCGIHLPGYRV

SEQ ID NO: 815 - protein, 32 aa, SARS-CoV Virus
KMWLIMLLIKDTLMDTPAKHLFPSLIMLFTQR

SEQ ID NO: 816 - protein, 48 aa, SARS-CoV Virus
MVLMWRSLKIRQHFLLMLHLSFGLSVTLNQCQRLRYSIIWVLISLLIL

SEQ ID NO: 817 - protein, 14 aa, SARS-CoV Virus
SGTTKEKPQHMYLQ

SEQ ID NO: 818 - protein, 4 aa, SARS-CoV Virus
VSAQ

SEQ ID NO: 819 - protein, 26 aa, SARS-CoV Virus
LTLPRNLLRVLVLHLLSCLMVEWKDR

SEQ ID NO: 820 - protein, 10 aa, SARS-CoV Virus
TFLETPVMVF

SEQ ID NO: 821 - protein, 7 aa, SARS-CoV Virus
QKVQSKV

SEQ ID NO: 822 - protein, 15 aa, SARS-CoV Virus
HLQRDQHKLASMESH

SEQ ID NO: 823 - protein, 4 aa, SARS-CoV Virus
LENQ

SEQ ID NO: 824 - protein, 9 aa, SARS-CoV Virus
KHSLTTLRK

SEQ ID NO: 825 - protein, 17 aa, SARS-CoV Virus
TALFNSCLKPTLLRAET

SEQ ID NO: 826 - protein, 49 aa, SARS-CoV Virus
RILSPDHKWKLTFSSSLWMNSYSDISSRAMPSNTSFMEISVMDNLAVFI

SEQ ID NO: 827 - protein, 10 aa, SARS-CoV Virus
PSAHKIHHLN

SEQ ID NO: 828 - protein, 9 aa, SARS-CoV Virus
RILSLWTAQ

SEQ ID NO: 829 - protein, 4 aa, SARS-CoV Virus
KITS

SEQ ID NO: 830 - protein, 13 aa, SARS-CoV Virus
QMRKQVHQNVCVL

SEQ ID NO: 831 - protein, 10 aa, SARS-CoV Virus
LIFYLMTLSR

SEQ ID NO: 832 - protein, 6 aa, SARS-CoV Virus
SHKICQ

SEQ ID NO: 833 - protein, 72 aa, SARS-CoV Virus
FQKWSRLQLTMLKFHSCFGVRMDMLKPSTQNYKQVKRGNQVLRCLTCTRCKECFLKSVTFRIMVKMLLYQKE

SEQ ID NO: 834 - protein, 11 aa, SARS-CoV Virus
MSQSILNCVNT

SEQ ID NO: 835 - protein, 4 aa, SARS-CoV Virus
IHLL

SEQ ID NO: 836 - protein, 5 aa, SARS-CoV Virus
LYPTT

SEQ ID NO: 837 - protein, 45 aa, SARS-CoV Virus
ELFTLVLALIKELHQVQLCSDNGCQLAHYLSIQILMTSSPTQILL

SEQ ID NO: 838 - protein, 27 aa, SARS-CoV Virus
LETVQQYIRLINGTLLLAICMTLGPNM

SEQ ID NO: 839 - protein, 17 aa, SARS-CoV Virus
QKRMTLKKGFSLICVDL

SEQ ID NO: 840 - protein, 5 aa, SARS-CoV Virus
PWVVL

SEQ ID NO: 841 - protein, 25 aa, SARS-CoV Virus
QSILGMLTFTSLWAISHGGQLLLQM

SEQ ID NO: 842 - protein, 8 aa, SARS-CoV Virus
MHHHRKHF

SEQ ID NO: 843 - protein, 40 aa, SARS-CoV Virus
LGLTILASRRNKLMAIPCMLTTFSGGTQILSSCLPIHSLT

SEQ ID NO: 844 - protein, 6 aa, SARS-CoV Virus
ANFLLN

SEQ ID NO: 845 - protein, 4 aa, SARS-CoV Virus
EELL

SEQ ID NO: 846 - protein, 10 aa, SARS-CoV Virus
CLLRRIKSMI

SEQ ID NO: 847 - protein, 67 aa, SARS-CoV Virus
FILFWKKVGLSLEKTTELWFQVIFLLTTKRTCLFSYYFLLSLVVVTLTGAPLLMMFKLLITLNILHL

SEQ ID NO: 848 - protein, 16 aa, SARS-CoV Virus
GGFTILMKFLDQTLFI

SEQ ID NO: 849 - protein, 52 aa, SARS-CoV Virus; identical to SEQ ID NO: 31

SEQ ID NO: 850 - protein, 6 aa, SARS-CoV Virus
TTSHSR

SEQ ID NO: 851 - protein, 36 aa, SARS-CoV Virus; identical to SEQ ID NO: 33

SEQ ID NO: 852 - protein, 51 aa, SARS-CoV Virus; identical to SEQ ID NO: 34

SEQ ID NO: 853 - protein, 10 aa, SARS-CoV Virus
FVIYLLVLTL

SEQ ID NO: 854 - protein, 40 aa, SARS-CoV Virus; identical to SEQ ID NO: 36

SEQ ID NO: 855 - protein, 56 aa, SARS-CoV Virus; identical to SEQ ID NO: 37

SEQ ID NO: 856 - protein, 59 aa, SARS-CoV Virus; identical to SEQ ID NO: 38

SEQ ID NO: 857 - protein, 13 aa, SARS-CoV Virus
MIFASPMSMQILL

SEQ ID NO: 858 - protein, 5 aa, SARS-CoV Virus
SREMM

SEQ ID NO: 859 - protein, 80 aa, SARS-CoV Virus; identical to SEQ ID NO: 41

SEQ ID NO: 860 - protein, 18 aa, SARS-CoV Virus
MIMVFTPLLALATNLTEL

SEQ ID NO: 861 - protein, 6 aa, SARS-CoV Virus
YFLLNF

SEQ ID NO: 862 - protein, 33 aa, SARS-CoV Virus; identical to SEQ ID NO: 44

SEQ ID NO: 863 - protein, 32 aa, SARS-CoV Virus; identical to SEQ ID NO: 45

SEQ ID NO: 864 - protein, 9 aa, SARS-CoV Virus
TFHLALLGV

SEQ ID NO: 865 - protein, 53 aa, SARS-CoV Virus; identical to SEQ ID NO: 47

SEQ ID NO: 866 - protein, 43 aa, SARS-CoV Virus
ELSMSTLLMSATFLLELAFVLVTIQFLYYVVLAKNLLWLILCL

SEQ ID NO: 867 - protein, 26 aa, SARS-CoV Virus
VLIVQLLTLITPLLYLLTFQLALLQK

SEQ ID NO: 868 - protein, 9 aa, SARS-CoV Virus
CLFLWLKPP

SEQ ID NO: 869 - protein, 26 aa, SARS-CoV Virus
IVICTSAEILLNVLICFSNMVAFAHN

SEQ ID NO: 870 - protein, 30 aa, SARS-CoV Virus
IVHSQVLLLNRIATHVKCSLKSNKCTKPQL

SEQ ID NO: 871 - protein, 15 aa, SARS-CoV Virus
NILVVLIFHKYYLTL

SEQ ID NO: 872 - protein, 15 aa, SARS-CoV Virus
SQLRGLLLRTCSLIR

SEQ ID NO: 873 - protein, 7 aa, SARS-CoV Virus
HSLMLAS

SEQ ID NO: 874 - protein, 6 aa, SARS-CoV Virus
SNMANA

SEQ ID NO: 875 - protein, 27 aa, SARS-CoV Virus
VILMLEISFVRRSSMDLQCCHLCSLMI

SEQ ID NO: 876 - protein, 7 aa, SARS-CoV Virus
LLPTLLL

SEQ ID NO: 877 - protein, 81 aa, SARS-CoV Virus
LVVLPLLDGHLVLALLFKYLLLCKWHIGSMALELPKMFSMRTKNKSPTNLTRRLVKFKNHLQQHQLHWASCKTLLTRMLKH

SEQ ID NO: 878 - protein, 17 aa, SARS-CoV Virus
THLLNNLALILVQFQVC

SEQ ID NO: 879 - protein, 18 aa, SARS-CoV Virus
MISFRDLIKSRRRYKLTG

SEQ ID NO: 880 - protein, 11 aa, SARS-CoV Virus
LQADFKAFKPM

SEQ ID NO: 881 - protein, 101 aa, SARS-CoV Virus
SGLLKSGLLLILLLLKCLSVFLDNQKELTFVERATTLCPSHKQPRMVLSSYMSRMCHPRRGTSPQRQQFVMKAKHTSLVKVFLCLMALLGLLHRGTSFLHK

SEQ ID NO: 882 - protein, 78 aa, SARS-CoV Virus
LLQTIHLSQEIVMSLLASLTTQFMILCNLSLTHSKKSWTSTSKIIHHQMLILATFQALTLLSSTFKKKLTASMRSLKI

SEQ ID NO: 883 - protein, 30 aa, SARS-CoV Virus
MNHSLTFKNWENMSNILNGLGMFGSASLLD

SEQ ID NO: 884 - protein, 12 aa, SARS-CoV Virus
LPSSWLQSCFVA

SEQ ID NO: 885 - protein, 59 aa, SARS-CoV Virus
LVVAVASRVHALVVLAASLMRMTLSQFSRVSNYITHKRTYGFVYEIFYSWINYCTASKN

SEQ ID NO: 886 - protein, 45 aa, SARS-CoV Virus
QCFSCKYCSCYSNDTATSLTPFRMACYWRCISCCFSERYQNNCAQ

SEQ ID NO: 887 - protein, 7 aa, SARS-CoV Virus
KMAASPL

SEQ ID NO: 888 - protein, 25 aa, SARS-CoV Virus
GLPVHLQFTAAICYHLFTSFACRCR

SEQ ID NO: 889 - protein, 20 aa, SARS-CoV Virus
GGAIFVPLCLDIFSTMHQRM

SEQ ID NO: 890 - protein, 19 aa, SARS-CoV Virus
NYYEMLALLEVQIQEPITL

SEQ ID NO: 891 - protein, 10 aa, SARS-CoV Virus
CQLLCLLAHT

SEQ ID NO: 892 - protein, 5 aa, SARS-CoV Virus
LLYTI

SEQ ID NO: 893 - protein, 9 aa, SARS-CoV Virus
QCHRYNCRY

SEQ ID NO: 894 - protein, 17 aa, SARS-CoV Virus
RHFNTKTQRRLPNWWLF

SEQ ID NO: 895 - protein, 4 aa, SARS-CoV Virus
ALRC

SEQ ID NO: 896 - protein, 16 aa, SARS-CoV Virus
RLCRCTWLFHRSLLPA

SEQ ID NO: 897 - protein, 10 aa, SARS-CoV Virus
VYTNYYRHWY

SEQ ID NO: 898 - protein, 7 aa, SARS-CoV Virus
KCYILHL

SEQ ID NO: 899 - protein, 17 aa, SARS-CoV Virus
RPTECANTHNRRLFRSC

SEQ ID NO: 900 - protein, 7 aa, SARS-CoV Virus
SSNGSNL

SEQ ID NO: 901 - protein, 5 aa, SARS-CoV Virus
ADDDY

SEQ ID NO: 902 - protein, 8 aa, SARS-CoV Virus
RAFVSTRK

SEQ ID NO: 903 - protein, 17 aa, SARS-CoV Virus
VRTYVLIRFGRNRYVNS

SEQ ID NO: 904 - protein, 31 aa, SARS-CoV Virus
RTSFSCFRGILASHTSHPYCASIVCVLLQYC

SEQ ID NO: 905 - protein, 14 aa, SARS-CoV Virus
REFSKTNGLRLLAC

SEQ ID NO: 906 - protein, 5 aa, SARS-CoV Virus
KSELF

SEQ ID NO: 907 - protein, 242 aa, SARS-CoV Virus
SSGLNELTIIIILFGTLTLLIMADNGTITVEELKQLLEQWNLVIGFLFLAWIMLLQFAYSNRNRFLYIIKLVFLWLLWPVTLACFVLAVVYRINWVTGGIAIAMACIVGLMWLSYFVASFRLFARTRSMWSFNPETNILLNVPLRGTIVTRPLMESELVIGAVIIRGHLRMAGHSLGRCDIKDLPKEITVATSRTLSYYKLGASQRVGTDSGFAAYNRYRIGNYKLNTDHAGSNDNIALLVQ

SEQ ID NO: 908 - protein, 8 aa, SARS-CoV Virus
VTTDVSSC

SEQ ID NO: 909 - protein, 23 aa, SARS-CoV Virus
LPGYNSRDIDYHYEDFQDCYLES

SEQ ID NO: 910 - protein, 11 aa, SARS-CoV Virus
RYNKFNSETII

SEQ ID NO: 911 - protein, 7 aa, SARS-CoV Virus
EELFGVR

SEQ ID NO: 912 - protein, 12 aa, SARS-CoV Virus
RTYGVRLSIKRT

SEQ ID NO: 913 - protein, 5 aa, SARS-CoV Virus
KLFSS

SEQ ID NO: 914 - protein, 21 aa, SARS-CoV Virus
LYLHLASYITIRSVLEVRLYY

SEQ ID NO: 915 - protein, 24 aa, SARS-CoV Virus
KNLAHQEHTRAIHHFTLLLTINLH

SEQ ID NO: 916 - protein, 51 aa, SARS-CoV Virus
LALAHTLLLLVLTVLDIPISCVQDQFHQNFSSDKRRFNKSSTRHFFSLLLL

SEQ ID NO: 917 - protein, 12 aa, SARS-CoV Virus
YFASPLRERQNE

SEQ ID NO: 918 - protein, 4 aa, SARS-CoV Virus
AHFN

SEQ ID NO: 919 - protein, 64 aa, SARS-CoV Virus
LLFVLFSLSAIPCFNNAYYILVFTRNPGSRRTLYQSLNEHETSHCFDLYFSMQLHMHCSTALCI

SEQ ID NO: 920 - protein, 4 aa, SARS-CoV Virus
TSCA

SEQ ID NO: 921 - protein, 16 aa, SARS-CoV Virus
GTTLGVILIALLGFVL

SEQ ID NO: 922 - protein, 32 aa, SARS-CoV Virus
ERFYLFIDGTLWFKHAHLMLLSTVKIQLVVRL

SEQ ID NO: 923 - protein, 21 aa, SARS-CoV Virus
LGVGTFMKVTKLLHLETYLLF

SEQ ID NO: 924 - protein, 428 aa, SARS-CoV Virus
INEQIKMSDNGPQSNQRSAPRITFGGPTDSTDNNQNGGRNGARPKQRRPQGLPNNTASWFTALTQHGKEELRFPRGQGVPINTNSGPDDQIGYYRRATRRVRGGDGKMKELSPRWYFYYLGTGPEASLPYGANKEGIVWVATEGALNTPKDHIGTRNPNNNAATVLQLPQGTTLPKGFYAEGSRGGSQASSRSSSRSRGNSRNSTPGSSRGNSPARMASGGGETALALLLLDRLNQLESKVSGKGQQQQGQTVTKKSAAEASKKPRQKRTATKQYNVTQAFGRRGPEQTQGNFGDQDLIRQGTDYKHWPQIAQFAPSASAFFGMSRIGMEVTPSGTWLTYHGAIKLDDKDPQFKDNVILLNKHIDAYKTFPPTEPKKDKKKKTDEAQPLPQRQKKQPTVTLLPAADMDDFSRQLQNSMSGASADSTQA

SEQ ID NO: 925 - protein, 12 aa, SARS-CoV Virus
TLMMTTQGRWAM

SEQ ID NO: 926 - protein, 16 aa, SARS-CoV Virus
TFSQFRLRYIVYSCAE

SEQ ID NO: 927 - protein, 8 aa, SARS-CoV Virus
ILVTKQHK

SEQ ID NO: 928 - protein, 9 aa, SARS-CoV Virus
LTLISHSNL

SEQ ID NO: 929 - protein, 28 aa, SARS-CoV Virus
SMCNIREDLKEPPHFHRGHAEYDRGYSE

SEQ ID NO: 930 - protein, 11 aa, SARS-CoV Virus
GELPIWKSPNV

SEQ ID NO: 931 - protein, 10 aa, SARS-CoV Virus
CYPHVILIAS

SEQ ID NO: 932 - protein, 8 aa, SARS-CoV Virus
ENDKKKKK

SEQ ID NO: 933 - DNA, 29742 bp, SARS-CoV Virus; identical to SEQ ID NO: 709
  CDS (2)..(29740)

SEQ ID NO: 934 - protein, 26 aa, SARS-CoV Virus
VFTYPGKANQPRSLVDLFSKRTLKSV

SEQ ID NO: 935 - protein, 15 aa, SARS-CoV Virus
LSLGCMPSAPTQYKQ

SEQ ID NO: 936 - protein, 9 aa, SARS-CoV Virus
ILLSLTRNE

SEQ ID NO: 937 - protein, 21 aa, SARS-CoV Virus
LVPLLQTAYGFVRVAVDHQHT

SEQ ID NO: 938 - protein, 36 aa, SARS-CoV Virus
VSSGCDRKVRWRALFLVSTRKHTSNSVCLSFRLETC

SEQ ID NO: 939 - protein, 25 aa, SARS-CoV Virus
CVASGTLWKRPYRRHVNTSKMALVV

SEQ ID NO: 940 - protein, 22 aa, SARS-CoV Virus
SWKKAYCPSLNSPMCSLNVLMP

SEQ ID NO: 941 - protein, 24 aa, SARS-CoV Virus
APITATRSLSWLQKWTAFSTVVAV

SEQ ID NO: 942 - protein, 37 aa, SARS-CoV Virus
HWEYSCHMWAKPQLHTAMFFFVRTVIREPVVIAMASI

SEQ ID NO: 943 - protein, 4 aa, SARS-CoV Virus
SLMT

SEQ ID NO: 944 - protein, 174 aa, SARS-CoV Virus
VTSLALIPLKIMNKTGTLSMAVVHSVNSLVSSMEVQSLAMSTTISVAQMGTLLIASKIFSHARASQCALFPNNLITSSRREVSTAAVTMSMKLPGSLSALIRATSTRHPSKLRVPRNLTLSKGNAQSLCFLLTQKSKSFNHVLKRKRLRVSWGVYALCTLLHLHRSVTICTCLP

SEQ ID NO: 945 - protein, 15 aa, SARS-CoV Virus
NVIIAMKFHGRRATF

SEQ ID NO: 946 - protein, 11 aa, SARS-CoV Virus
KPLVNIVALKI

SEQ ID NO: 947 - protein, 15 aa, SARS-CoV Virus
LLKDLLHVGTYLLML

SEQ ID NO: 948 - protein, 79 aa, SARS-CoV Virus
KCHVLPVKTQRLDLSIVLQIITTTQTLKLDSAREVGLDVLEAVCLPMLAAIISVPTGFLVLVLILAQAILALLVTMWRP

SEQ ID NO: 949 - protein, 7 aa, SARS-CoV Virus
MRISLRY

SEQ ID NO: 950 - protein, 14 aa, SARS-CoV Virus
VVNVLTLTLLAIFI

SEQ ID NO: 951 - protein, 21 aa, SARS-CoV Virus
MKRLPSFWHLSLLLQVPLLTL

SEQ ID NO: 952 - protein, 25 aa, SARS-CoV Virus
RVLITSLSKPLLSPAVTIKLPRESP

SEQ ID NO: 953 - protein, 12 aa, SARS-CoV Virus
KVLGTLDNRDQF

SEQ ID NO: 954 - protein, 70 aa, SARS-CoV Virus
HHCVVFPHRLLVLSDQFLRAHLMQQTTQFLICKEQLSPYLMVFLNSHYVLSTPWFILQTCSPTVSLLWHM

SEQ ID NO: 955 - protein, 73 aa, SARS-CoV Virus
LVVLYNRLLSGCLIFWALLLKNSGLSLNGLRRNLVQELNFSRMLGRFSNFSLQVFLTSSRVKYRLLQITSRIV

SEQ ID NO: 956 - protein, 29 aa, SARS-CoV Virus
NASLMLLTRHSKCALIKSLSLAQSCDHST

SEQ ID NO: 957 - protein, 33 aa, SARS-CoV Virus
VKSSSLKARDFTVSVYVARSSCNYSCLLRHQKK

SEQ ID NO: 958 - protein, 45 aa, SARS-CoV Virus
PFLKVIHMTQYLPLRRLFSRTVNSKHSRRPLIASQMELSSAHQSV

SEQ ID NO: 959 - protein, 5 aa, SARS-CoV Virus
MASCS

SEQ ID NO: 960 - protein, 23 aa, SARS-CoV Virus
RLRTKNNTAHCLLVYWLQTMSFA

SEQ ID NO: 961 - protein, 8 aa, SARS-CoV Virus
KGVHQLKV

SEQ ID NO: 962 - protein, 15 aa, SARS-CoV Virus
PLEKILFGKFKVTRM

SEQ ID NO: 963 - protein, 35 aa, SARS-CoV Virus
ESHLSLMNVLTKCLMKSALSTLLNPVPKLLSLHVL

SEQ ID NO: 964 - protein, 4 aa, SARS-CoV Virus
QRLL

SEQ ID NO: 965 - protein, 21 aa, SARS-CoV Virus
RLYNQFLISLPTWVLILMSGV

SEQ ID NO: 966 - protein, 106 aa, SARS-CoV Virus
LHSTYLMMLVKKTFHHVCIVPFTLQMRKKRTMQSVRKKKLMKPVNMSTVQRMIIKVSLWNLVPQLKQFELRKKKRKTGWMILLSNQRLSQNQNLHLKNQLISLLVI

SEQ ID NO: 967 - protein, 23 aa, SARS-CoV Virus
NLLTMLPLNVLTSLRRHKVLILW

SEQ ID NO: 968 - protein, 6 aa, SARS-CoV Virus
MLLTYT

SEQ ID NO: 969 - protein, 5 aa, SARS-CoV Virus
NMVVV

SEQ ID NO: 970 - protein, 21 aa, SARS-CoV Virus
QVHSTRQPMVPCKRRVMITLS

SEQ ID NO: 971 - protein, 5 aa, SARS-CoV Virus
MALLQ

SEQ ID NO: 972 - protein, 22 aa, SARS-CoV Virus
EGLVCFLDIILLRSVCMLLDLT

SEQ ID NO: 973 - protein, 71 aa, SARS-CoV Virus
MQVRTSSFLRQHMKISIHRTSYLHHCCQQAYLVLNHFSLYKCACRRFVHRFILQSMTKLFMSRLSWIILIT

SEQ ID NO: 974 - protein, 31 aa, SARS-CoV Virus
SLEWKHLNKRSHQTQKIPKLRRNLSYRSLSM

SEQ ID NO: 975 - protein, 58 aa, SARS-CoV Virus
SQKLRPALMRLPQHWKKLSFLPISYSCLLISMVSFTMILRTCLEVKICLSLRRMHLTW

SEQ ID NO: 976 - protein, 12 aa, SARS-CoV Virus
VMLSLVVISLVL

SEQ ID NO: 977 - protein, 16 aa, SARS-CoV Virus
YPPKRLVALLRCSQEL

SEQ ID NO: 978 - protein, 8 aa, SARS-CoV Virus
RKCQLMSI

SEQ ID NO: 979 - protein, 41 aa, SARS-CoV Virus
PRTLDKDVLVIHLRKLRLLLRNANLHFMYYLQKHLMLRKRF

SEQ ID NO: 980 - protein, 6 aa, SARS-CoV Virus
ELYPGI

SEQ ID NO: 981 - protein, 12 aa, SARS-CoV Virus
EKCLLMLKRQEN

SEQ ID NO: 982 - protein, 9 aa, SARS-CoV Virus
CLYAWMLEP

SEQ ID NO: 983 - protein, 32 aa, SARS-CoV Virus
WQPSNVSIKELKFKRASLTMVSDSSFILVKSL

SEQ ID NO: 984 - protein, 6 aa, SARS-CoV Virus
LLLLRS

SEQ ID NO: 985 - protein, 11 aa, SARS-CoV Virus
MSRLSQCQLVM

SEQ ID NO: 986 - protein, 20 aa, SARS-CoV Virus
HMVLILKRLRAVCVLLKLLP

SEQ ID NO: 987 - protein, 27 aa, SARS-CoV Virus
CQYHHQMLLLHIMDTSLRHQRHLRSTL

SEQ ID NO: 988 - protein, 20 aa, SARS-CoV Virus
KQFLWLALTEIGPIQDSVQS

SEQ ID NO: 989 - protein, 33 aa, SARS-CoV Virus
VLNFLSVVTKLCTTLWRAPSSFILTVRFFHLTN

SEQ ID NO: 990 - protein, 11 aa, SARS-CoV Virus
RVSYPCGRLRL

SEQ ID NO: 991 - protein, 19 aa, SARS-CoV Virus
KCSQLWTTLISTHSLWICL

SEQ ID NO: 992 - protein, 22 aa, SARS-CoV Virus
HMDSSLVQHTWMVLMLQKLNLM

SEQ ID NO: 993 - protein, 38 aa, SARS-CoV Virus
IMRVRLSLYYLVMTHYVVKLSSTTILLMRVFLVGTCLL

SEQ ID NO: 994 - protein, 13 aa, SARS-CoV Virus
TTQRNGNFLKLVV

SEQ ID NO: 995 - protein, 16 aa, SARS-CoV Virus
LQLNGLITIVICLVFY

SEQ ID NO: 996 - protein, 50 aa, SARS-CoV Virus
HFNSLKSNSMHQHFKRLIIEPVLVMLLTFVHSYSLTVIKLLASLVMSEKL

SEQ ID NO: 997 - protein, 29 aa, SARS-CoV Virus
PIFYSMLIWNLQSEFLMWCVNIVVRKLLP

SEQ ID NO: 998 - protein, 28 aa, SARS-CoV Virus
CIWVLYLMIILRQVFPFHVCVVVMLHNI

SEQ ID NO: 999 - protein, 8 aa, SARS-CoV Virus
YNKSLLLL

SEQ ID NO: 1000 - protein, 32 aa, SARS-CoV Virus
CLHHLLSINYSKVHSYVRMSTLVTISVVITLI

SEQ ID NO: 1001 - protein, 23 aa, SARS-CoV Virus
LLRRPSIVLTELTLQRCQSTKDQ

SEQ ID NO: 1002 - protein, 48 aa, SARS-CoV Virus
LMFSTRKHLTLQPSSLCRINSMELLTQRLNQNWMGIIKRIMLTIQSSL

SEQ ID NO: 1003 - protein, 28 aa, SARS-CoV Virus
TLYQLNHYQMRVLIISNSHVLTQNLLMI

SEQ ID NO: 1004 - protein, 18 aa, SARS-CoV Virus
QASQSQLHESYLSHSSQT

SEQ ID NO: 1005 - protein, 51 aa, SARS-CoV Virus
WLLTIDTIQRVSRKVLNYCISQLFGTLTRLQPRQRSNQTLGVYVVFGVQSQ

SEQ ID NO: 1006 - protein, 10 aa, SARS-CoV Virus
ILQIHLKFWQ

SEQ ID NO: 1007 - protein, 20 aa, SARS-CoV Virus
KTHKEWTILLVKVNNPPLKK

SEQ ID NO: 1008 - protein, 10 aa, SARS-CoV Virus
WKILPYRRKS

SEQ ID NO: 1009 - protein, 5 aa, SARS-CoV Virus
KLPKL

SEQ ID NO: 1010 - protein, 13 aa, SARS-CoV Virus
AMSYLNHQMKVLK

SEQ ID NO: 1011 - protein, 24 aa, SARS-CoV Virus
VMRILWLLMWKTQALPLRNLMSFH

SEQ ID NO: 1012 - protein, 26 aa, SARS-CoV Virus
KQLPLMVLLQLIVFLGVKFWLMSNHS

SEQ ID NO: 1013 - protein, 13 aa, SARS-CoV Virus
DKQQLQHQIALRD

SEQ ID NO: 1014 - protein, 57 aa, SARS-CoV Virus
HNVCLTIICLMCLHYCSNCVLLLKVPILELELHYLQLLLKIVLRVLLNYVWMPALIM

SEQ ID NO: 1015 - protein, 17 aa, SARS-CoV Virus
SHPNFLNCSQSLCGYCC

SEQ ID NO: 1016 - protein, 45 aa, SARS-CoV Virus
LLLLVYSYLILVLLLIVMALENCILIRLTLLLWISVKVLFLAAFV

SEQ ID NO: 1017 - protein, 13 aa, SARS-CoV Virus
TPLILIQLLKPFR

SEQ ID NO: 1018 - protein, 6 aa, SARS-CoV Virus
RFHRTS

SEQ ID NO: 1019 - protein, 19 aa, SARS-CoV Virus
VWPLSGFWHICCSQNSFIY

SEQ ID NO: 1020 - protein, 4 aa, SARS-CoV Virus
VFQL

SEQ ID NO: 1021 - protein, 63 aa, SARS-CoV Virus
CRCSLAILLVISSAILGSCGLSLVLYKWHPFLQWLGCTSSLLLSTTYGRAMFISWMVAPLRLA

SEQ ID NO: 1022 - protein, 19 aa, SARS-CoV Virus
CAISAIVPHALSVQLLLMA

SEQ ID NO: 1023 - protein, 65 aa, SARS-CoV Virus
RDLSMSMQMEAVASARLTIGIVSIVTHFALVVHSLVMKLLVICHSSLKDQSTLLTSHRILLIVLL

SEQ ID NO: 1024 - protein, 27 aa, SARS-CoV Virus
KMARFTSTLTRLVKRPMRDIRSPILSI

SEQ ID NO: 1025 - protein, 13 aa, SARS-CoV Virus
ELTTLKVHCLLMS

SEQ ID NO: 1026 - protein, 22 aa, SARS-CoV Virus
FLMASPNATSLLLSLLLCTTVS

SEQ ID NO: 1027 - protein, 55 aa, SARS-CoV Virus
CANLFCCLTKLLYQTLEIVLKFPLRCLMLMSTPFQQLLVFLWKNLRHLLLQLTAS

SEQ ID NO: 1028 - protein, 36 aa, SARS-CoV Virus
MVSFLHSCQLPDKVLLIPMLTQRMLLNVSNFHITLT

SEQ ID NO: 1029 - protein, 17 aa, SARS-CoV Virus
QVTVVTISCSPIIRLKT

SEQ ID NO: 1030 - protein, 19 aa, SARS-CoV Virus
RPEILAHVLTVMQGISMPK

SEQ ID NO: 1031 - protein, 11 aa, SARS-CoV Virus
QKVTMFHSSGM

SEQ ID NO: 1032 - protein, 26 aa, SARS-CoV Virus
KTTCLYLNSCVNKFVLLPRRTTYLLH

SEQ ID NO: 1033 - protein, 11 aa, SARS-CoV Virus
LVLQLDRLSMS

SEQ ID NO: 1034 - protein, 98 aa, SARS-CoV Virus
LLKSHSRVVRLLVLVLNLCLRPHYCAFLLHWFVISLCQYIHCQSMMVTQMKSLVTKPFRMVSLVTSFLLMIVLQINMLVLTHGLASVVVHTKMTKAAL

SEQ ID NO: 1035 - protein, 10 aa, SARS-CoV Virus
LLSLQERLVS

SEQ ID NO: 1036 - protein, 8 aa, SARS-CoV Virus
CLAYRVLC

SEQ ID NO: 1037 - protein, 64 aa, SARS-CoV Virus
EQSMVTSCIFYLVFLVLLATFATHLPNSLSIVILLPLLAFLLLSVQFLRMLWANLCHIVMTLIC

SEQ ID NO: 1038 - protein, 35 aa, SARS-CoV Virus
RVLFLIVSFVQTLVMCLWMVPSYSFLTLTWRVLLE

SEQ ID NO: 1039 - protein, 17 aa, SARS-CoV Virus
QLLMLSTVDMVHAKGQK

SEQ ID NO: 1040 - protein, 29 aa, SARS-CoV Virus
VFAYLPVVDGFLIMSITELYQEFSVVLMR

SEQ ID NO: 1041 - protein, 13 aa, SARS-CoV Virus
LTSLLLLCNLWVL

SEQ ID NO: 1042 - protein, 5 aa, SARS-CoV Virus
MCLLQ

SEQ ID NO: 1043 - protein, 9 aa, SARS-CoV Virus
WLVVLLPYW

SEQ ID NO: 1044 - protein, 7 aa, SARS-CoV Virus
LVLPTTL

SEQ ID NO: 1045 - protein, 20 aa, SARS-CoV Virus
NSDVFLVSTTMLLLLMHFCF

SEQ ID NO: 1046 - protein, 25 aa, SARS-CoV Virus
CLSLYSVWYQLTAFCRESTQSFTCT

SEQ ID NO: 1047 - protein, 27 aa, SARS-CoV Virus
HSISPMMFHSWLTFNGLPCFLLLCLFG

SEQ ID NO: 1048 - protein, 9 aa, SARS-CoV Virus
QQSMYSVFL

SEQ ID NO: 1049 - protein, 40 aa, SARS-CoV Virus
STAIGSLTTILGKESCLMELHLVPSRRLLCVPFCSTRKCT

SEQ ID NO: 1050 - protein, 29 aa, SARS-CoV Virus
NCVARHCCHLHSITGILLYITSTSISVEP

SEQ ID NO: 1051 - protein, 12 aa, SARS-CoV Virus
ILPAIVKQLAAT

SEQ ID NO: 1052 - protein, 44 aa, SARS-CoV Virus
MTLATQVLMFSTNHHRHQSLLLFCRVVLGKWHSRQAKLKGAWYK

SEQ ID NO: 1053 - protein, 94 aa, SARS-CoV Virus
PVELQLLMDCGWMTQYTVQDMSFAQQKTCLILTMKICSFANPTIAFLFRLAMFNFVLLAILCKIVCLGLKLILLTLRHPSINLSVSNLVKHFQF

SEQ ID NO: 1054 - protein, 14 aa, SARS-CoV Virus
HATMVHHLVFISVP

SEQ ID NO: 1055 - protein, 46 aa, SARS-CoV Virus
DLIIPLKVLSLMDHVVVLVLTLIMIACLSAICIIWSFQQEYTLVLT

SEQ ID NO: 1056 - protein, 22 aa, SARS-CoV Virus
KVNSMVHLLTDKLHRLQVQTQP

SEQ ID NO: 1057 - protein, 24 aa, SARS-CoV Virus
MFWHGCMLLLSMVIGGFLIDSPLL

SEQ ID NO: 1058 - protein, 7 aa, SARS-CoV Virus
MTLTLWQ

SEQ ID NO: 1059 - protein, 6 aa, SARS-CoV Virus
STTMNL

SEQ ID NO: 1060 - protein, 19 aa, SARS-CoV Virus
HKIMLTYWDLFLLKQELPS

SEQ ID NO: 1061 - protein, 5 aa, SARS-CoV Virus
ICVLL

SEQ ID NO: 1062 - protein, 7 aa, SARS-CoV Virus
KSCCRMV

SEQ ID NO: 1063 - protein, 10 aa, SARS-CoV Virus
MVVLSLVALF

SEQ ID NO: 1064 - protein, 34 aa, SARS-CoV Virus
KMSLHHLMLLDNALVLPSKVSSRKLLRALIIGCF

SEQ ID NO: 1065 - protein, 67 aa, SARS-CoV Virus
FLFKVHSGHCFSLFTRMLSCHLLLVLWQLLHVLCCLLSISTHSCACFCYLLLQQLLTLIWSTCLLAG

SEQ ID NO: 1066 - protein, 24 aa, SARS-CoV Virus
HGLNWLTLACLVIGLRIVLCMLQL

SEQ ID NO: 1067 - protein, 5 aa, SARS-CoV Virus
FCLFS

SEQ ID NO: 1068 - protein, 15 aa, SARS-CoV Virus
QLALFMMMLLDVFGH

SEQ ID NO: 1069 - protein, 14 aa, SARS-CoV Virus
MSLHLFTKSTMVML

SEQ ID NO: 1070 - protein, 8 aa, SARS-CoV Virus
IKLFPCGP

SEQ ID NO: 1071 - protein, 13 aa, SARS-CoV Virus
PLTILVSLRLSCF

SEQ ID NO: 1072 - protein, 27 aa, SARS-CoV Virus
CLCVLSITHCYLLLATPYSVSCLFIVS

SEQ ID NO: 1073 - protein, 36 aa, SARS-CoV Virus
AIVAAATLAFSVYSTVTSGLLLVFMTTWSLHKNLGI

SEQ ID NO: 1074 - protein, 41 aa, SARS-CoV Virus
TPRGFCLLRVVLMLSSLTLSCWVLEVNHVSRLLLYSLKCLT

SEQ ID NO: 1075 - protein, 15 aa, SARS-CoV Virus
SAHLWYCSRFFNNLE

SEQ ID NO: 1076 - protein, 43 aa, SARS-CoV Virus
SHLLNCGHNVYNSTMIFFLQKTQLKLSRRWFLFCLFCYPCRVL

SEQ ID NO: 1077 - protein, 42 aa, SARS-CoV Virus
TLIGCARKCSITVLLFRLLLQNLVLYHHMPLMPLPRRPMSRL

SEQ ID NO: 1078 - protein, 11 aa, SARS-CoV Virus
LMVILKSFSKS

SEQ ID NO: 1079 - protein, 24 aa, SARS-CoV Virus
MWLNLSLTVMLPCNASWKRWQIRL

SEQ ID NO: 1080 - protein, 15 aa, SARS-CoV Virus
PKCTNRQDLRTRGQK

SEQ ID NO: 1081 - protein, 38 aa, SARS-CoV Virus
LVLCKQCSSLCLGSLIMMHLTTLSTMRVMVVFHSTSYH

SEQ ID NO: 1082 - protein, 66 aa, SARS-CoV Virus
LQQPNSWLLSLIMVPTRTLVMVTPLHMHLHSGKSSKLLMRIARLFNLVKLTWTIHQIWLGLLLLQL

SEQ ID NO: 1083 - protein, 12 aa, SARS-CoV Virus
EPTQLLNYRIMN

SEQ ID NO: 1084 - protein, 77 aa, SARS-CoV Virus
HYDRCPVRLVPHKQLVLMTMHLPTITIRREVGLCWHYYQTTKISNGLDSLRVMVQVQFTQNWNHLVGLLQTHQKGLK

SEQ ID NO: 1085 - protein, 8 aa, SARS-CoV Virus
NTCTSSKA

SEQ ID NO: 1086 - protein, 8 aa, SARS-CoV Virus
IEVWCWAV

SEQ ID NO: 1087 - protein, 27 aa, SARS-CoV Virus
LLQYVFRLEMLQKYLPIQLCFPSVLLQ

SEQ ID NO: 1088 - protein, 9 aa, SARS-CoV Virus
TLLKHIRIT

SEQ ID NO: 1089 - protein, 10 aa, SARS-CoV Virus
QVEDNQSPTV

SEQ ID NO: 1090 - protein, 14 aa, SARS-CoV Virus
RCCVHTLVQDRQLL

SEQ ID NO: 1091 - protein, 34 aa, SARS-CoV Virus
HQKLTWTKSPLVVLHVVCIVDATLTIQILKDSVT

SEQ ID NO: 1092 - protein, 44 aa, SARS-CoV Virus
KVSTSKYLPLVLMTQWVLHLETQSVPSAECGKVMAVVVTNSANP

SEQ ID NO: 1093 - protein, 9 aa, SARS-CoV Virus
CSLRMHQRF

SEQ ID NO: 1094 - protein, 17 aa, SARS-CoV Virus
TGLRCKCSPSYTVRHRH

SEQ ID NO: 1095 - protein, 6 aa, SARS-CoV Virus
CRLQGF

SEQ ID NO: 1096 - protein, 15 aa, SARS-CoV Virus
YLQRKKCWFCKVPKN

SEQ ID NO: 1097 - protein, 8 aa, SARS-CoV Virus
LLSLPGEG

SEQ ID NO: 1098 - protein, 11 aa, SARS-CoV Virus
GRQFIRLLLCS

SEQ ID NO: 1099 - protein, 5 aa, SARS-CoV Virus
EAYYV

SEQ ID NO: 1100 - protein, 4 aa, SARS-CoV Virus
RDYL

SEQ ID NO: 1101 - protein, 8 aa, SARS-CoV Virus
RLSSGCCP

SEQ ID NO: 1102 - protein, 4 aa, SARS-CoV Virus
LFQV

SEQ ID NO: 1103 - protein, 11 aa, SARS-CoV Virus
HGTTYITSASN

SEQ ID NO: 1104 - protein, 4 aa, SARS-CoV Virus
IHNG

SEQ ID NO: 1105 - protein, 8 aa, SARS-CoV Virus
FSLCSTSF

SEQ ID NO: 1106 - protein, 12 aa, SARS-CoV Virus
YIKRNTRHIQLL

SEQ ID NO: 1107 - protein, 4 aa, SARS-CoV Virus
EGLV

SEQ ID NO: 1108 - protein, 5 aa, SARS-CoV Virus
LRRES

SEQ ID NO: 1109 - protein, 6 aa, SARS-CoV Virus
HLTRIC

SEQ ID NO: 1110 - protein, 17 aa, SARS-CoV Virus
ACTPIIIKDCTILRCYA

SEQ ID NO: 1111 - protein, 10 aa, SARS-CoV Virus
CRHCRRTDIR

SEQ ID NO: 1112 - protein, 7 aa, SARS-CoV Virus
WELVRFR

SEQ ID NO: 1113 - protein, 27 aa, SARS-CoV Virus
FRTSSTRLRSSYCGFILLIADAHPHFD

SEQ ID NO: 1114 - protein, 4 aa, SARS-CoV Virus
GIGC

SEQ ID NO: 1115 - protein, 5 aa, SARS-CoV Virus
VPYGC

SEQ ID NO: 1116 - protein, 6 aa, SARS-CoV Virus
SRKTTY

SEQ ID NO: 1117 - protein, 6 aa, SARS-CoV Virus
VGFAEI

SEQ ID NO: 1118 - protein, 13 aa, SARS-CoV Virus
FYGRETLSLRPLF

SEQ ID NO: 1119 - protein, 11 aa, SARS-CoV Virus
ILGPDIPSQLY

SEQ ID NO: 1120 - protein, 8 aa, SARS-CoV Virus
VYPSLCKL

SEQ ID NO: 1121 - protein, 35 aa, SARS-CoV Virus
CVIFYCVSTYKFWTTSKKNICRWCSFCCFNWIPFS

SEQ ID NO: 1122 - protein, 5 aa, SARS-CoV Virus
VRSRT

SEQ ID NO: 1123 - protein, 6 aa, SARS-CoV Virus
SGCKLT

SEQ ID NO: 1124 - protein, 13 aa, SARS-CoV Virus
LASQFQGTFSVCC

SEQ ID NO: 1125 - protein, 13 aa, SARS-CoV Virus
SSYACSFWQFIAR

SEQ ID NO: 1126 - protein, 22 aa, SARS-CoV Virus
THYMLFSSCTNKQCCFSNCQTR

SEQ ID NO: 1127 - protein, 4 aa, SARS-CoV Virus
LCCV

SEQ ID NO: 1128 - protein, 5 aa, SARS-CoV Virus
GRKFC

SEQ ID NO: 1129 - protein, 15 aa, SARS-CoV Virus
TKTLLLCSGWQRCYQ

SEQ ID NO: 1130 - protein, 4 aa, SARS-CoV Virus
LLSL

SEQ ID NO: 1131 - protein, 5 aa, SARS-CoV Virus
SANNV

SEQ ID NO: 1132 - protein, 8 aa, SARS-CoV Virus
YQTTPIRS

SEQ ID NO: 1133 - protein, 7 aa, SARS-CoV Virus
LLRWWLY

SEQ ID NO: 1134 - protein, 6 aa, SARS-CoV Virus
CQPSNR

SEQ ID NO: 1135 - protein, 6 aa, SARS-CoV Virus
ISWFPI

SEQ ID NO: 1136 - protein, 4 aa, SARS-CoV Virus
LNEL

SEQ ID NO: 1137 - protein, 9 aa, SARS-CoV Virus
GSRCTFRVY

SEQ ID NO: 1138 - protein, 10 aa, SARS-CoV Virus
CHPYYNSNES

SEQ ID NO: 1139 - protein, 10 aa, SARS-CoV Virus
SSHRSWCLYL

SEQ ID NO: 1140 - protein, 4 aa, SARS-CoV Virus
YYDK

SEQ ID NO: 1141 - protein, 13 aa, SARS-CoV Virus
TVSSEIIEVNSRH

SEQ ID NO: 1142 - protein, 16 aa, SARS-CoV Virus
RSYCGNWNKQVLRWLA

SEQ ID NO: 1143 - protein, 7 aa, SARS-CoV Virus
YVKNCLQ

SEQ ID NO: 1144 - protein, 14 aa, SARS-CoV Virus
CRNSTPYGLGLSKM

SEQ ID NO: 1145 - protein, 4 aa, SARS-CoV Virus
QSHA

SEQ ID NO: 1146 - protein, 11 aa, SARS-CoV Virus
DNGLSCSCSQT

SEQ ID NO: 1147 - protein, 9 aa, SARS-CoV Virus
LITPFLQVS

SEQ ID NO: 1148 - protein, 7 aa, SARS-CoV Virus
RVCASIK

SEQ ID NO: 1149 - protein, 10 aa, SARS-CoV Virus
DGHVWRLTIC

SEQ ID NO: 1150 - protein, 7 aa, SARS-CoV Virus
TRWNIIR

SEQ ID NO: 1151 - protein, 6 aa, SARS-CoV Virus
CYNCLC

SEQ ID NO: 1152 - protein, 15 aa, SARS-CoV Virus
HLSSCYSQCKCTSFN

SEQ ID NO: 1153 - protein, 11 aa, SARS-CoV Virus
QVCPQSTTQAL

SEQ ID NO: 1154 - protein, 6 aa, SARS-CoV Virus
VLRLPA

SEQ ID NO: 1155 - protein, 8 aa, SARS-CoV Virus
TFLHDDSF

SEQ ID NO: 1156 - protein, 5 aa, SARS-CoV Virus
CRCVL

SEQ ID NO: 1157 - protein, 8 aa, SARS-CoV Virus
LCGSRFSS

SEQ ID NO: 1158 - protein, 7 aa, SARS-CoV Virus
GSSLLSK

SEQ ID NO: 1159 - protein, 4 aa, SARS-CoV Virus
CVHV

SEQ ID NO: 1160 - protein, 5 aa, SARS-CoV Virus
GKMLD

SEQ ID NO: 1161 - protein, 13 aa, SARS-CoV Virus
RTSRILLTAYNAS

SEQ ID NO: 1162 - protein, 20 aa, SARS-CoV Virus
LRVPALPRSIKNIRRRLFCR

SEQ ID NO: 1163 - protein, 10 aa, SARS-CoV Virus
YCQNRWYTYD

SEQ ID NO: 1164 - protein, 7 aa, SARS-CoV Virus
KVRVTGY

SEQ ID NO: 1165 - protein, 8 aa, SARS-CoV Virus
CLPTYKTS

SEQ ID NO: 1166 - protein, 4 aa, SARS-CoV Virus
SGVC

SEQ ID NO: 1167 - protein, 9 aa, SARS-CoV Virus
CLSLVFTIH

SEQ ID NO: 1168 - protein, 14 aa, SARS-CoV Virus
AYWPHVGHVFRNAN

SEQ ID NO: 1169 - protein, 7 aa, SARS-CoV Virus
HLTVLGT

SEQ ID NO: 1170 - protein, 30 aa, SARS-CoV Virus
GYVHTTYSLAGCRCLCIVQFTDFTSLRCLY

SEQ ID NO: 1171 - protein, 10 aa, SARS-CoV Virus
ETIPMLQVLL

SEQ ID NO: 1172 - protein, 13 aa, SARS-CoV Virus
PCHFNITQISVVC

SEQ ID NO: 1173 - protein, 9 aa, SARS-CoV Virus
SLCLQCPRL

SEQ ID NO: 1174 - protein, 16 aa, SARS-CoV Virus
CDTTVSRRYELLLQVT

SEQ ID NO: 1175 - protein, 5 aa, SARS-CoV Virus
FSIMC

SEQ ID NO: 1176 - protein, 14 aa, SARS-CoV Virus
WSGFWFIQKHMCRQ

SEQ ID NO: 1177 - protein, 7 aa, SARS-CoV Virus
LQCDSNM

SEQ ID NO: 1178 - protein, 11 aa, SARS-CoV Virus
CWRLHTCQHLY

SEQ ID NO: 1179 - protein, 13 aa, SARS-CoV Virus
ETQAFRSRNAQSH

SEQ ID NO: 1180 - protein, 13 aa, SARS-CoV Virus
AVIWYCHCTRSTL

SEQ ID NO: 1181 - protein, 12 aa, SARS-CoV Virus
QRIASFMGGWKT

SEQ ID NO: 1182 - protein, 15 aa, SARS-CoV Virus
TTIEQKLCLYWLPCN

SEQ ID NO: 1183 - protein, 8 aa, SARS-CoV Virus
STDWRVHL

SEQ ID NO: 1184 - protein, 15 aa, SARS-CoV Virus
CCCVQRYYDIQVECW

SEQ ID NO: 1185 - protein, 12 aa, SARS-CoV Virus
LLCVDISHCNAT

SEQ ID NO: 1186 - protein, 24 aa, SARS-CoV Virus
CTYSSATRALCENYWLVPNTQHLR

SEQ ID NO: 1187 - protein, 23 aa, SARS-CoV Virus
QCCKLSKGRHAKVLYTPRTTWYW

SEQ ID NO: 1188 - protein, 26 aa, SARS-CoV Virus
ESFCHRTCSLLPICSHSVYGMLSCSC

SEQ ID NO: 1189 - protein, 9 aa, SARS-CoV Virus
KGIKIFAHR

SEQ ID NO: 1190 - protein, 11 aa, SARS-CoV Virus
NHTCACARRVF

SEQ ID NO: 1191 - protein, 23 aa, SARS-CoV Virus
IQSEFNTRTVCFLHCKCIARNNC

SEQ ID NO: 1192 - protein, 4 aa, SARS-CoV Virus
HCSL

SEQ ID NO: 1193 - protein, 5 aa, SARS-CoV Virus
NLYGY

SEQ ID NO: 1194 - protein, 6 aa, SARS-CoV Virus
LECCQC

SEQ ID NO: 1195 - protein, 23 aa, SARS-CoV Virus
TSCKTLRLYWRSCSITSPPHIAD

SEQ ID NO: 1196 - protein, 8 aa, SARS-CoV Virus
RHTRTRIF

SEQ ID NO: 1197 - protein, 23 aa, SARS-CoV Virus
FSVQTYENNRSRHVPWNLSPLSC

SEQ ID NO: 1198 - protein, 7 aa, SARS-CoV Virus
HCECFSL

SEQ ID NO: 1199 - protein, 6 aa, SARS-CoV Virus
AKSTQG

SEQ ID NO: 1200 - protein, 15 aa, SARS-CoV Virus
VSSMLQNVLQRCYYT

SEQ ID NO: 1201 - protein, 32 aa, SARS-CoV Virus
CFICNQQTSNRRCKRISYTQSCLEKSCFYLTL

SEQ ID NO: 1202 - protein, 17 aa, SARS-CoV Virus
FTERCSFKNLRIAYADC

SEQ ID NO: 1203 - protein, 5 aa, SARS-CoV Virus
FITGF

SEQ ID NO: 1204 - protein, 8 aa, SARS-CoV Virus
LCHIHTNY

SEQ ID NO: 1205 - protein, 5 aa, SARS-CoV Virus
NSTLL

SEQ ID NO: 1206 - protein, 20 aa, SARS-CoV Virus
CQPLQCGYHKGKNWHFVHNV

SEQ ID NO: 1207 - protein, 26 aa, SARS-CoV Virus
QTAIYKSRNTTSQCGYITSRKCNWTF

SEQ ID NO: 1208 - protein, 16 aa, SARS-CoV Virus
DHYWSSSYTGTYTPQR

SEQ ID NO: 1209 - protein, 5 aa, SARS-CoV Virus
YKIQD

SEQ ID NO: 1210 - protein, 4 aa, SARS-CoV Virus
RIMC

SEQ ID NO: 1211 - protein, 11 aa, SARS-CoV Virus
HTRHTKGHDLP

SEQ ID NO: 1212 - protein, 17 aa, SARS-CoV Virus
THLYDGFQNELPSQWLP

SEQ ID NO: 1213 - protein, 18 aa, SARS-CoV Virus
YVYHPRRSYSSRSCVDWL

SEQ ID NO: 1214 - protein, 7 aa, SARS-CoV Virus
CRGLSCN

SEQ ID NO: 1215 - protein, 5 aa, SARS-CoV Virus
RCCGY

SEQ ID NO: 1216 - protein, 11 aa, SARS-CoV Virus
PTSPARIFYRC

SEQ ID NO: 1217 - protein, 9 aa, SARS-CoV Virus
LSSCTDWLC

SEQ ID NO: 1218 - protein, 6 aa, SARS-CoV Virus
HRIHQS

SEQ ID NO: 1219 - protein, 6 aa, SARS-CoV Virus
CKTSTR

SEQ ID NO: 1220 - protein, 7 aa, SARS-CoV Virus
TSYTTHV

SEQ ID NO: 1221 - protein, 9 aa, SARS-CoV Virus
RLALECSAY

SEQ ID NO: 1222 - protein, 6 aa, SARS-CoV Virus
DSTNAQ

SEQ ID NO: 1223 - protein, 18 aa, SARS-CoV Virus
YTERIVRQSRVRPLGAWL

SEQ ID NO: 1224 - protein, 12 aa, SARS-CoV Virus
AYINEVLCQDWT

SEQ ID NO: 1225 - protein, 6 aa, SARS-CoV Virus
KNVLSV

SEQ ID NO: 1226 - protein, 22 aa, SARS-CoV Virus
QTCNLLFYFIRYLCLLESFCGF

SEQ ID NO: 1227 - protein, 4 aa, SARS-CoV Virus
PIYD

SEQ ID NO: 1228 - protein, 8 aa, SARS-CoV Virus
CSAVGLYG

SEQ ID NO: 1229 - protein, 12 aa, SARS-CoV Virus
PTLPGTWKCTCG

SEQ ID NO: 1230 - protein, 4 aa, SARS-CoV Virus
CYHD

SEQ ID NO: 1231 - protein, 5 aa, SARS-CoV Virus
MFSSP

SEQ ID NO: 1232 - protein, 6 aa, SARS-CoV Virus
IPYYRR

SEQ ID NO: 1233 - protein, 17 aa, SARS-CoV Virus
FCLQKSTTHGCEVCIAC

SEQ ID NO: 1234 - protein, 5 aa, SARS-CoV Virus
VSSSS

SEQ ID NO: 1235 - protein, 13 aa, SARS-CoV Virus
HWKSKGYQVCASG

SEQ ID NO: 1236 - protein, 11 aa, SARS-CoV Virus
SRMEVLRCSAM

SEQ ID NO: 1237 - protein, 17 aa, SARS-CoV Virus
QSLQNRGTLLFLCYTSR

SEQ ID NO: 1238 - protein, 8 aa, SARS-CoV Virus
WCLFVLEL

SEQ ID NO: 1239 - protein, 9 aa, SARS-CoV Virus
SLPSQCNCV

SEQ ID NO: 1240 - protein, 12 aa, SARS-CoV Virus
HKSLVKLELTRL

SEQ ID NO: 1241 - protein, 4 aa, SARS-CoV Virus
FVCE

SEQ ID NO: 1242 - protein, 9 aa, SARS-CoV Virus
ACIPHSSFR

SEQ ID NO: 1243 - protein, 4 aa, SARS-CoV Virus
KCIY

SEQ ID NO: 1244 - protein, 10 aa, SARS-CoV Virus
FKAIAFLLLF

SEQ ID NO: 1245 - protein, 10 aa, SARS-CoV Virus
VSWQTSSVGY

SEQ ID NO: 1246 - protein, 25 aa, SARS-CoV Virus
LCSTQICYVYYTMQFRWCCLQTPCK

SEQ ID NO: 1247 - protein, 8 aa, SARS-CoV Virus
VPTVLGCI

SEQ ID NO: 1248 - protein, 7 aa, SARS-CoV Virus
YDDFCWI

SEQ ID NO: 1249 - protein, 7 aa, SARS-CoV Virus
PMDLQTI

SEQ ID NO: 1250 - protein, 16 aa, SARS-CoV Virus
PVEYIYQVTEFRKCGL

SEQ ID NO: 1251 - protein, 11 aa, SARS-CoV Virus
WTRRRSTCFHH

SEQ ID NO: 1252 - protein, 9 aa, SARS-CoV Virus
CCLHKGRWY

SEQ ID NO: 1253 - protein, 4 aa, SARS-CoV Virus
CGDL

SEQ ID NO: 1254 - protein, 5 aa, SARS-CoV Virus
DNTSC

SEQ ID NO: 1255 - protein, 5 aa, SARS-CoV Virus
TSARD

SEQ ID NO: 1256 - protein, 23 aa, SARS-CoV Virus
YCNLGLQKRSPSTCIYNRCLHND

SEQ ID NO: 1257 - protein, 6 aa, SARS-CoV Virus
HCQETY

SEQ ID NO: 1258 - protein, 10 aa, SARS-CoV Virus
ECLFFTYCLV

SEQ ID NO: 1259 - protein, 8 aa, SARS-CoV Virus
SGRTGRPF

SEQ ID NO: 1260 - protein, 21 aa, SARS-CoV Virus
WCFNNRRFSQRSNTFKGTSTS

SEQ ID NO: 1261 - protein, 15 aa, SARS-CoV Virus
RQWSHINWRISKNTV

SEQ ID NO: 1262 - protein, 10 aa, SARS-CoV Virus
ESRRHYSTVA

SEQ ID NO: 1263 - protein, 12 aa, SARS-CoV Virus
NLLYSEQRLRGF

SEQ ID NO: 1264 - protein, 7 aa, SARS-CoV Virus
AQITNGN

SEQ ID NO: 1265 - protein, 7 aa, SARS-CoV Virus
LSRARYG

SEQ ID NO: 1266 - protein, 5 aa, SARS-CoV Virus
IHTAI

SEQ ID NO: 1267 - protein, 37 aa, SARS-CoV Virus
ARGLCLRTHRLWRFQSWTTWRSSFNDRLSQALTRFTT

SEQ ID NO: 1268 - protein, 31 aa, SARS-CoV Virus
IRGFYPYGQHSEKLLHNRCANRFIKMCVFCD

SEQ ID NO: 1269 - protein, 21 aa, SARS-CoV Virus
LCRDNKVTRFVSDFKSGQGYN

SEQ ID NO: 1270 - protein, 7 aa, SARS-CoV Virus
NFIHALV

SEQ ID NO: 1271 - protein, 4 aa, SARS-CoV Virus
GWTC

SEQ ID NO: 1272 - protein, 19 aa, SARS-CoV Virus
NLLPKTTSKSSVATRCCDA

SEQ ID NO: 1273 - protein, 9 aa, SARS-CoV Virus
LVQDAKNAS

SEQ ID NO: 1274 - protein, 5 aa, SARS-CoV Virus
PSELW

SEQ ID NO: 1275 - protein, 42 aa, SARS-CoV Virus
KCCYTKRNNDECRKVYSTVSILKYTYFSCTLQHESYSLWCWL

SEQ ID NO: 1276 - protein, 24 aa, SARS-CoV Virus
RSCTRYSCAQTMVANWHTTCRFRS

SEQ ID NO: 1277 - protein, 19 aa, SARS-CoV Virus
LRLRRRFYFNWRLCNSTYG

SEQ ID NO: 1278 - protein, 5 aa, SARS-CoV Virus
MGPYY

SEQ ID NO: 1279 - protein, 8 aa, SARS-CoV Virus
DQTCDKRE

SEQ ID NO: 1280 - protein, 32 aa, SARS-CoV Virus
RRVFHLSVWIYKAKTSPGWFYSCKDNRAFLEC

SEQ ID NO: 1281 - protein, 30 aa, SARS-CoV Virus
PLQAYGPFLMVDSFCYKCKCIIIGSIFNWG

SEQ ID NO: 1282 - protein, 9 aa, SARS-CoV Virus
LSWQAEGTN

SEQ ID NO: 1283 - protein, 6 aa, SARS-CoV Virus
WLYHAC

SEQ ID NO: 1284 - protein, 18 aa, SARS-CoV Virus
LHFLEEHKSYPVVFLFTL

SEQ ID NO: 1285 - protein, 6 aa, SARS-CoV Virus
HEQISS

SEQ ID NO: 1286 - protein, 9 aa, SARS-CoV Virus
IKRNCCNVS

SEQ ID NO: 1287 - protein, 5 aa, SARS-CoV Virus
GESNQ

SEQ ID NO: 1288 - protein, 9 aa, SARS-CoV Virus
YDLFSSGKR

SEQ ID NO: 1289 - protein, 9 aa, SARS-CoV Virus
RKQQSCGFK

SEQ ID NO: 1290 - protein, 15 aa, SARS-CoV Virus
QLNEHVYFLIISYSH

SEQ ID NO: 1291 - protein, 5 aa, SARS-CoV Virus
PVHHF

SEQ ID NO: 1292 - protein, 4 aa, SARS-CoV Virus
CSSS

SEQ ID NO: 1293 - protein, 14 aa, SARS-CoV Virus
LHSTYFIYEGGLLS

SEQ ID NO: 1294 - protein, 16 aa, SARS-CoV Virus
IRHSLFNSGFISSILF

SEQ ID NO: 1295 - protein, 7 aa, SARS-CoV Virus
CYRVSYY

SEQ ID NO: 1296 - protein, 10 aa, SARS-CoV Virus
SYVWQPCHTF

SEQ ID NO: 1297 - protein, 33 aa, SARS-CoV Virus; identical to SEQ ID NO: 161

SEQ ID NO: 1298 - protein, 6 aa, SARS-CoV Virus
CCYTSM

SEQ ID NO: 1299 - protein, 7 aa, SARS-CoV Virus
QPFLCCF

SEQ ID NO: 1300 - protein, 12 aa, SARS-CoV Virus
THGYTDTYYDIR

SEQ ID NO: 1301 - protein, 7 aa, SARS-CoV Virus
LHFRVHI

SEQ ID NO: 1302 - protein, 4 aa, SARS-CoV Virus
CLFA

SEQ ID NO: 1303 - protein, 6 aa, SARS-CoV Virus
CFRKVR

SEQ ID NO: 1304 - protein, 7 aa, SARS-CoV Virus
TLTRVCV

SEQ ID NO: 1305 - protein, 7 aa, SARS-CoV Virus
RWVSLCL

SEQ ID NO: 1306 - protein, 9 aa, SARS-CoV Virus
GLSTYRCSS

SEQ ID NO: 1307 - protein, 5 aa, SARS-CoV Virus
STFWF

SEQ ID NO: 1308 - protein, 6 aa, SARS-CoV Virus
HFETYF

SEQ ID NO: 1309 - protein, 5 aa, SARS-CoV Virus
VASWY

SEQ ID NO: 1310 - protein, 4 aa, SARS-CoV Virus
HYKF

SEQ ID NO: 1311 - protein, 34 aa, SARS-CoV Virus; identical to SEQ ID NO: 175

SEQ ID NO: 1312 - protein, 8 aa, SARS-CoV Virus
KWYNHRCC

SEQ ID NO: 1313 - protein, 7 aa, SARS-CoV Virus
LFSKSTC

SEQ ID NO: 1314 - protein, 5 aa, SARS-CoV Virus
TQMLC

SEQ ID NO: 1315 - protein, 7 aa, SARS-CoV Virus
QRNLPDL

SEQ ID NO: 1316 - protein, 13 aa, SARS-CoV Virus
FQGCSLRRCCEIP

SEQ ID NO: 1317 - protein, 11 aa, SARS-CoV Virus
YYKLVSFWRGF

SEQ ID NO: 1318 - protein, 13 aa, SARS-CoV Virus
IPFCLCMGEKKNF

SEQ ID NO: 1319 - protein, 13 aa, SARS-CoV Virus
LLCALQLNIFFNL

SEQ ID NO: 1320 - protein, 7 aa, SARS-CoV Virus
VLWRFCH

SEQ ID NO: 1321 - protein, 16 aa, SARS-CoV Virus
SLLLQCLCRFFCSQGR

SEQ ID NO: 1322 - protein, 13 aa, SARS-CoV Virus
CKTNSARTNWCYC

SEQ ID NO: 1323 - protein, 10 aa, SARS-CoV Virus
FHGLCPCLEY

SEQ ID NO: 1324 - protein, 5 aa, SARS-CoV Virus
CYFNW

SEQ ID NO: 1325 - protein, 4 aa, SARS-CoV Virus
TWQA

SEQ ID NO: 1326 - protein, 4 aa, SARS-CoV Virus
ERHI

SEQ ID NO: 1327 - protein, 5 aa, SARS-CoV Virus
CAFLP

SEQ ID NO: 1328 - protein, 9 aa, SARS-CoV Virus
WQTLHPTCS

SEQ ID NO: 1329 - protein, 6 aa, SARS-CoV Virus
LLLAIK

SEQ ID NO: 1330 - protein, 21 aa, SARS-CoV Virus
LWFLHHYWHWLPTLQSCSTFF

SEQ ID NO: 1331 - protein, 15 aa, SARS-CoV Virus
TFKCTGHGLWTKIIH

SEQ ID NO: 1332 - protein, 6 aa, SARS-CoV Virus
EPVCQF

SEQ ID NO: 1333 - protein, 23 aa, SARS-CoV Virus
WTHWYWCVNSFFKEISTISTIWP

SEQ ID NO: 1334 - protein, 5 aa, SARS-CoV Virus
FRSRS

SEQ ID NO: 1335 - protein, 23 aa, SARS-CoV Virus
NIRHFTLLFWGCKCNYTWNKCFI

SEQ ID NO: 1336 - protein, 8 aa, SARS-CoV Virus
SCCSISRC

SEQ ID NO: 1337 - protein, 34 aa, SARS-CoV Virus; identical to SEQ ID NO: 201

SEQ ID NO: 1338 - protein, 6 aa, SARS-CoV Virus
ACRHFL

SEQ ID NO: 1339 - protein, 11 aa, SARS-CoV Virus
VRHSYWSWHLC

SEQ ID NO: 1340 - protein, 8 aa, SARS-CoV Virus
LPYSFFIT

SEQ ID NO: 1341 - protein, 13 aa, SARS-CoV Virus
PKIYCGLYYVFRC

SEQ ID NO: 1342 - protein, 5 aa, SARS-CoV Virus
FNCLL

SEQ ID NO: 1343 - protein, 6 aa, SARS-CoV Virus
HHCYTY

SEQ ID NO: 1344 - protein, 11 aa, SARS-CoV Virus
HYYRSNACFYG

SEQ ID NO: 1345 - protein, 5 aa, SARS-CoV Virus
NLRRL

SEQ ID NO: 1346 - protein, 8 aa, SARS-CoV Virus
YVHLRRFY

SEQ ID NO: 1347 - protein, 6 aa, SARS-CoV Virus
FASPIW

SEQ ID NO: 1348 - protein, 14 aa, SARS-CoV Virus
LLHTTKSCTLRYCC

SEQ ID NO: 1349 - protein, 6 aa, SARS-CoV Virus
TGSQHT

SEQ ID NO: 1350 - protein, 20 aa, SARS-CoV Virus
SVRSSQTNVQNPNFEIFWWF

SEQ ID NO: 1351 - protein, 6 aa, SARS-CoV Virus
FFTNIT

SEQ ID NO: 1352 - protein, 5 aa, SARS-CoV Virus
PSKAN

SEQ ID NO: 1353 - protein, 4 aa, SARS-CoV Virus
EVFY

SEQ ID NO: 1354 - protein, 4 aa, SARS-CoV Virus
GLAL

SEQ ID NO: 1355 - protein, 4 aa, SARS-CoV Virus
GDTR

SEQ ID NO: 1356 - protein, 12 aa, SARS-CoV Virus
CWLHEAIWRMPR

SEQ ID NO: 1357 - protein, 19 aa, SARS-CoV Virus
RSHLCAEVQWTYSVATSAH

SEQ ID NO: 1358 - protein, 10 aa, SARS-CoV Virus
YDCCLHCCSS

SEQ ID NO: 1359 - protein, 25 aa, SARS-CoV Virus
WYCHCWMDIWCWRCSSNTFCYANGI

SEQ ID NO: 1360 - protein, 12 aa, SARS-CoV Virus
VQWHWSYPKCSL

SEQ ID NO: 1361 - protein, 9 aa, SARS-CoV Virus
EPKTNRQPI

SEQ ID NO: 1362 - protein, 20 aa, SARS-CoV Virus
SNSRITYNNINCIGQAARRC

SEQ ID NO: 1363 - protein, 10 aa, SARS-CoV Virus
PECSSIKHTC

SEQ ID NO: 1364 - protein, 9 aa, SARS-CoV Virus
FWCNFKCAK

SEQ ID NO: 1365 - protein, 5 aa, SARS-CoV Virus
YPFAT

SEQ ID NO: 1366 - protein, 7 aa, SARS-CoV Virus
SRGGGTN

SEQ ID NO: 1367 - protein, 22 aa, SARS-CoV Virus
QVNYRQTSKPSNLCNTTTNQGC

SEQ ID NO: 1368 - protein, 5 aa, SARS-CoV Virus
NQGFC

SEQ ID NO: 1369 - protein, 4 aa, SARS-CoV Virus
SCCY

SEQ ID NO: 1370 - protein, 9 aa, SARS-CoV Virus
VCSWTIKKS

SEQ ID NO: 1371 - protein, 42 aa, SARS-CoV Virus
LLWKGLPPYVLPTSSPAWCCLPTCHVCAIPGEELHHSASNLS

SEQ ID NO: 1372 - protein, 7 aa, SARS-CoV Virus
RQSILPS

SEQ ID NO: 1373 - protein, 5 aa, SARS-CoV Virus
RCFCV

SEQ ID NO: 1374 - protein, 28 aa, SARS-CoV Virus
WHFLVYYTEELLFSTNNYYRQYICLRKL

SEQ ID NO: 1375 - protein, 6 aa, SARS-CoV Virus
CRYWHH

SEQ ID NO: 1376 - protein, 4 aa, SARS-CoV Virus
QHSL

SEQ ID NO: 1377 - protein, 4 aa, SARS-CoV Virus
SSAT

SEQ ID NO: 1378 - protein, 18 aa, SARS-CoV Virus
LIQRRAGQVLQKSYITRC

SEQ ID NO: 1379 - protein, 7 aa, SARS-CoV Virus
SWRHFRH

SEQ ID NO: 1380 - protein, 10 aa, SARS-CoV Virus
RFCRQHSKRN

SEQ ID NO: 1381 - protein, 7 aa, SARS-CoV Virus
PSRIGKI

SEQ ID NO: 1382 - protein, 27 aa, SARS-CoV Virus
MALVCLARLHCWTNCHRHGYNLALLHD

SEQ ID NO: 1383 - protein, 17 aa, SARS-CoV Virus
LLQLPQGCMLLWFLLQV

SEQ ID NO: 1384 - protein, 289 aa, SARS-CoV Virus
ASSQGCQITLHINELMDLFMRFFTLGSITAQPVKIDNASPASTVHATATIPLQASLPFGWLVIGVAFLAVFQSATKIIALNKRWQLALYKGFQFICNLLLLFVTIYSHLLLVAAGKEAQFLYLYALIYFLQCINACRIIMRCWLCWKCKSKNPLLYDANYFVCWHTHNYDYCIPYNSVTDTIVVTEGDGISTPKLKEDYQIGGYSEDRHSGVKDYVVVHGYFTEVYYQLESTQITTDTGIENATFFIFNKLVKDPPNVQIHTIDGSSGVANPAMDPIYDEPTTTTSVPL

SEQ ID NO: 1385 - protein, 84 aa, SARS-CoV Virus
AQESEYELMYSFVSEETGTLIVNSVLLFLAFVVFLLVTLAILTALRLCAYCCNIVNVSLVKPTVYVYSRVKNLNSSEGVPDLLV

SEQ ID NO: 1386 - protein, 9 aa, SARS-CoV Virus
LLLLFCLEL

SEQ ID NO: 1387 - protein, 24 aa, SARS-CoV Virus
HCLSWQTTVLLPLRSLNNSWNNGT

SEQ ID NO: 1388 - protein, 4 aa, SARS-CoV Virus
VSYS

SEQ ID NO: 1389 - protein, 18 aa, SARS-CoV Virus
PGLCYYNLPILIGTGFCT

SEQ ID NO: 1390 - protein, 10 aa, SARS-CoV Virus
SLFSSGSCGQ

SEQ ID NO: 1391 - protein, 15 aa, SARS-CoV Virus
HLLVLCLLLSTELIG

SEQ ID NO: 1392 - protein, 11 aa, SARS-CoV Virus
LAGLRLQWLVL

SEQ ID NO: 1393 - protein, 38 aa, SARS-CoV Virus; identical to SEQ ID NO: 412

SEQ ID NO: 1394 - protein, 13 aa, SARS-CoV Virus
PDRSWKVNLSLVL

SEQ ID NO: 1395 - protein, 12 aa, SARS-CoV Virus
SFVVTCEWPDTP

SEQ ID NO: 1396 - protein, 24 aa, SARS-CoV Virus
GAVTLRTCQKRSLWLHHERFLITN

SEQ ID NO: 1397 - protein, 5 aa, SARS-CoV Virus
ERRSV

SEQ ID NO: 1398 - protein, 18 aa, SARS-CoV Virus
ALIQVLLHTTATVLETIN

SEQ ID NO: 1399 - protein, 13 aa, SARS-CoV Virus
IQTTPVATTILLC

SEQ ID NO: 1400 - protein, 65 aa, SARS-CoV Virus
QQMFHLVDFQVTIAEILIIIMRTFRIAIWNLDVIISSIVRQLFKPLTKKNYSELDDEEPMELDYP

SEQ ID NO: 1401 - protein, 26 aa, SARS-CoV Virus
NEHENYSLPDIDCIYILRAISLSGVC

SEQ ID NO: 1402 - protein, 25 aa, SARS-CoV Virus
RYDCTTKRTLPIRNIRGQFTISPSC

SEQ ID NO: 1403 - protein, 6 aa, SARS-CoV Virus
ICTNLH

SEQ ID NO: 1404 - protein, 8 aa, SARS-CoV Virus
HTLCFCLC

SEQ ID NO: 1405 - protein, 48 aa, SARS-CoV Virus
RYSTYLSAACKISFTKTFHQTRGGSTRALLATFSHCCCSSIFNTLLHH

SEQ ID NO: 1406 - protein, 48 aa, SARS-CoV Virus
EKDRMNELTLIDFYLCFLAFLLFLVLIMLIIFWFSLEIQDLEEPCTKV

SEQ ID NO: 1407 - protein, 41 aa, SARS-CoV Virus
TNMKLLIVLTCISLCSCICTVVQRCASNKPHVLEDPCKVQH

SEQ ID NO: 1408 - protein, 14 aa, SARS-CoV Virus
HCLALCSRKGFTFS

SEQ ID NO: 1409 - protein, 10 aa, SARS-CoV Virus
MAHYGSNMHT

SEQ ID NO: 1410 - protein, 15 aa, SARS-CoV Virus
CYYQLSRSSWWCAYS

SEQ ID NO: 1411 - protein, 5 aa, SARS-CoV Virus
VLVPS

SEQ ID NO: 1412 - protein, 7 aa, SARS-CoV Virus
RSPNCCI

SEQ ID NO: 1413 - protein, 7 aa, SARS-CoV Virus
RRTCCFK

SEQ ID NO: 1414 - protein, 106 aa, SARS-CoV Virus
TNKLKCLIMDPNQTNVVPPALHLVDPQIQLTITRMEDAMGQGQNSADPKVYPIILRLGSQLSLSMARRNLDSLEARAFQSTPIVVQMTKLATTEELPDEFVVVTAK

SEQ ID NO: 1415 - protein, 11 aa, SARS-CoV Virus
KSSAPDGTSIT

SEQ ID NO: 1416 - protein, 25 aa, SARS-CoV Virus
ELAQKLHFPTALTKKASYGLQLREP

SEQ ID NO: 1417 - protein, 84 aa, SARS-CoV Virus
IHPKTTLAPAILITMLPPCYNFLKEQHCQKASTQREAEAAVKPLLAPHHVVAVIQEIQLLAAVGEILLLEWLAEVVKLPSRYCC

SEQ ID NO: 1418 - protein, 63 aa, SARS-CoV Virus
TSLRAKFLVKANNNKAKLSLRNLLLRHLKSLAKNVLPQNSTTSLKHLGDVVQNKPKEISGTKT

SEQ ID NO: 1419 - protein, 39 aa, SARS-CoV Virus
SDKELITNIGRKLHNLLQVPLHSLECHALAWKSHLREHG

SEQ ID NO: 1420 - protein, 21 aa, SARS-CoV Virus
LIMEPLNWMTKIHNSKTTSYC

SEQ ID NO: 1421 - protein, 38 aa, SARS-CoV Virus
TSTLTHTKHSHQQSLKRTKRKRLMKLSLCRRDKRSSPL

SEQ ID NO: 1422 - protein, 18 aa, SARS-CoV Virus
LFFLRLTWMISPDNFKIP

SEQ ID NO: 1423 - protein, 13 aa, SARS-CoV Virus
VELLLIQLRHKHS

SEQ ID NO: 1424 - protein, 18 aa, SARS-CoV Virus
PHKADGLCKRFRNSVYDT

SEQ ID NO: 1425 - protein, 9 aa, SARS-CoV Virus
STLVQNEFS

SEQ ID NO: 1426 - protein, 8 aa, SARS-CoV Virus
LNSTSRFS

SEQ ID NO: 1427 - protein, 15 aa, SARS-CoV Virus
SHIAIFNQCVTLGRT

SEQ ID NO: 1428 - protein, 43 aa, SARS-CoV Virus
KSHHIFIEATRSTIEGTVNNARESCLYGRALMCKINFSSAIPM

SEQ ID NO: 1429 - protein, 10 aa, SARS-CoV Virus
LLRRMTKKKK

SEQ ID NO: 1430 - DNA, 29742 bp, SARS-CoV Virus; identical to SEQ ID NO: 709
  CDS (3)..(29741)

SEQ ID NO: 1431 - protein, 16 aa, SARS-CoV Virus
IRFLPTQEKPTNLDLL

SEQ ID NO: 1432 - protein, 7 aa, SARS-CoV Virus
ICSLNEL

SEQ ID NO: 1433 - protein, 25 aa, SARS-CoV Virus
NLCSCRSAACLVHLRSINNNKFYCR

SEQ ID NO: 1434 - protein, 35 aa, SARS-CoV Virus
QETSNSSLFCRLLTVSSVLQSIISIPRFRPGVTER

SEQ ID NO: 1435 - protein, 23 aa, SARS-CoV Virus
DGEPCSWCQRENTRPTQFACPSG

SEQ ID NO: 1436 - protein, 19 aa, SARS-CoV Virus
RRASAWLRGLCGRGPIGGT

SEQ ID NO: 1437 - protein, 20 aa, SARS-CoV Virus
TPQKWHLWSSRAGKRRTAPA

SEQ ID NO: 1438 - protein, 6 aa, SARS-CoV Virus
TALCVH

SEQ ID NO: 1439 - protein, 11 aa, SARS-CoV Virus
CLKHQSRPQGR

SEQ ID NO: 1440 - protein, 12 aa, SARS-CoV Virus
AGCRNGRHSVRS

SEQ ID NO: 1441 - protein, 24 aa, SARS-CoV Virus
RYNTGSTRATCGRNPNCIPQCSSS

SEQ ID NO: 1442 - protein, 5 aa, SARS-CoV Virus
GSRWS

SEQ ID NO: 1443 - protein, 8 aa, SARS-CoV Virus
LWHRSKVL

SEQ ID NO: 1444 - protein, 4 aa, SARS-CoV Virus
RAWH

SEQ ID NO: 1445 - protein, 5 aa, SARS-CoV Virus
TKLEH

SEQ ID NO: 1446 - protein, 7 aa, SARS-CoV Virus
AWQWCTP

SEQ ID NO: 1447 - protein, 22 aa, SARS-CoV Virus
AQWRCSHSLCRQQFLWPRWVPS

SEQ ID NO: 1448 - protein, 20 aa, SARS-CoV Virus
LHQRFSRTRGQVNVHSFRTT

SEQ ID NO: 1449 - protein, 12 aa, SARS-CoV Virus
LHRVEERCLLLP

SEQ ID NO: 1450 - protein, 5 aa, SARS-CoV Virus
NCLVH

SEQ ID NO: 1451 - protein, 10 aa, SARS-CoV Virus
ELRAPDTLRN

SEQ ID NO: 1452 - protein, 5 aa, SARS-CoV Virus
ECQEI

SEQ ID NO: 1453 - protein, 13 aa, SARS-CoV Virus
HFQRGMPKVCVSS

SEQ ID NO: 1454 - protein, 10 aa, SARS-CoV Virus
LKSQSHSTTC

SEQ ID NO: 1455 - protein, 4 aa, SARS-CoV Virus
KEKD

SEQ ID NO: 1456 - protein, 18 aa, SARS-CoV Virus
GFHGAYTLCVPCCISTGV

SEQ ID NO: 1457 - protein, 10 aa, SARS-CoV Virus
QYALVYLDEM

SEQ ID NO: 1458 - protein, 13 aa, SARS-CoV Virus
SFMADVRLSESHL

SEQ ID NO: 1459 - protein, 4 aa, SARS-CoV Virus
TLWH

SEQ ID NO: 1460 - protein, 4 aa, SARS-CoV Virus
KFSY

SEQ ID NO: 1461 - protein, 10 aa, SARS-CoV Virus
RTYYMWVPTY

SEQ ID NO: 1462 - protein, 17 aa, SARS-CoV Virus
CCSENAMSCLSRPRDWT

SEQ ID NO: 1463 - protein, 10 aa, SARS-CoV Virus
CCRLSQPLKH

SEQ ID NO: 1464 - protein, 7 aa, SARS-CoV Virus
NSTPQGR

SEQ ID NO: 1465 - protein, 13 aa, SARS-CoV Virus
MFWRLCVCLCWLL

SEQ ID NO: 1466 - protein, 8 aa, SARS-CoV Virus
ACLLGSSC

SEQ ID NO: 1467 - protein, 10 aa, SARS-CoV Virus
YWLRPYWHYW

SEQ ID NO: 1468 - protein, 6 aa, SARS-CoV Virus
QCGDLE

SEQ ID NO: 1469 - protein, 4 aa, SARS-CoV Virus
DTES

SEQ ID NO: 1470 - protein, 8 aa, SARS-CoV Virus
HCWRFSFE

SEQ ID NO: 1471 - protein, 17 aa, SARS-CoV Virus
RGCHHFGIFLCFYKCLY

SEQ ID NO: 1472 - protein, 5 aa, SARS-CoV Virus
HYKES

SEQ ID NO: 1473 - protein, 8 aa, SARS-CoV Virus
LQVFQNHC

SEQ ID NO: 1474 - protein, 42 aa, SARS-CoV Virus
SYQGKARKRCLEHWTTEISFNTTVWFSLTGCWCYQINFCAHT

SEQ ID NO: 1475 - protein, 7 aa, SARS-CoV Virus
CSKPLNS

SEQ ID NO: 1476 - protein, 9 aa, SARS-CoV Virus
FAKSSCHHT

SEQ ID NO: 1477 - protein, 39 aa, SARS-CoV Virus
TVITSCRRHGLYFRPAHQQCHYYGICNWWSCTTDFSVVV

SEQ ID NO: 1478 - protein, 6 aa, SARS-CoV Virus
SFGHYC

SEQ ID NO: 1479 - protein, 6 aa, SARS-CoV Virus
KTQAYL

SEQ ID NO: 1480 - protein, 17 aa, SARS-CoV Virus
ISQGCLGDSQISHYRCF

SEQ ID NO: 1481 - protein, 11 aa, SARS-CoV Virus
HRQGSNTGCFR

SEQ ID NO: 1482 - protein, 9 aa, SARS-CoV Virus
HQGLCKMLH

SEQ ID NO: 1483 - protein, 7 aa, SARS-CoV Virus
QGTRNVH

SEQ ID NO: 1484 - protein, 15 aa, SARS-CoV Virus
SSHYRWRKVAITQLR

SEQ ID NO: 1485 - protein, 26 aa, SARS-CoV Virus
SLHRSKQGTLPSVYTWQGAAATTHAS

SEQ ID NO: 1486 - protein, 8 aa, SARS-CoV Virus
GTKRSNLS

SEQ ID NO: 1487 - protein, 5 aa, SARS-CoV Virus
HSTYL

SEQ ID NO: 1488 - protein, 7 aa, SARS-CoV Virus
GGCSQER

SEQ ID NO: 1489 - protein, 8 aa, SARS-CoV Virus
TRSTRDAR

SEQ ID NO: 1490 - protein, 21 aa, SARS-CoV Virus
LHKWSYRRHTSLCKWPHALRD

SEQ ID NO: 1491 - protein, 27 aa, SARS-CoV Virus
GQRTILRIVSWFTGYKQCLSLKRGCTN

SEQ ID NO: 1492 - protein, 22 aa, SARS-CoV Virus
RCNLWRRYCLGSSRLQECENHI

SEQ ID NO: 1493 - protein, 7 aa, SARS-CoV Virus
KVLCLHC

SEQ ID NO: 1494 - protein, 6 aa, SARS-CoV Virus
IRYRSY

SEQ ID NO: 1495 - protein, 17 aa, SARS-CoV Virus
VCMCCSRGCCEDFTTSF

SEQ ID NO: 1496 - protein, 7 aa, SARS-CoV Virus
SPYQHGY

SEQ ID NO: 1497 - protein, 9 aa, SARS-CoV Virus
VECSYILLI

SEQ ID NO: 1498 - protein, 15 aa, SARS-CoV Virus
RKLFITYVLFLLPSR

SEQ ID NO: 1499 - protein, 8 aa, SARS-CoV Virus
GRRGRCRV

SEQ ID NO: 1500 - protein, 4 aa, SARS-CoV Virus
GRRN

SEQ ID NO: 1501 - protein, 5 aa, SARS-CoV Virus
VRYRG

SEQ ID NO: 1502 - protein, 12 aa, SARS-CoV Virus
LSRSPSGIWCLS

SEQ ID NO: 1503 - protein, 4 aa, SARS-CoV Virus
NSSS

SEQ ID NO: 1504 - protein, 9 aa, SARS-CoV Virus
GRRRGRLAG

SEQ ID NO: 1505 - protein, 4 aa, SARS-CoV Virus
AIRD

SEQ ID NO: 1506 - protein, 7 aa, SARS-CoV Virus
ARTRTYT

SEQ ID NO: 1507 - protein, 9 aa, SARS-CoV Virus
SVYWLFKTY

SEQ ID NO: 1508 - protein, 4 aa, SARS-CoV Virus
QCCH

SEQ ID NO: 1509 - protein, 5 aa, SARS-CoV Virus
GGTKC

SEQ ID NO: 1510 - protein, 8 aa, SARS-CoV Virus
SYGDCKCC

SEQ ID NO: 1511 - protein, 25 aa, SARS-CoV Virus
HTPETWWWCSRCTQQGNQWCHAKGE

SEQ ID NO: 1512 - protein, 16 aa, SARS-CoV Virus
AKWPSYSRRVLFAFWT

SEQ ID NO: 1513 - protein, 8 aa, SARS-CoV Virus
EVSACCWT

SEQ ID NO: 1514 - protein, 4 aa, SARS-CoV Virus
PKCR

SEQ ID NO: 1515 - protein, 5 aa, SARS-CoV Virus
GHPAS

SEQ ID NO: 1516 - protein, 20 aa, SARS-CoV Virus
KFQFTGHLTCTIVVSRHIWC

SEQ ID NO: 1517 - protein, 21 aa, SARS-CoV Virus
TTSVFTSVRADGSYTGLYCSQ

SEQ ID NO: 1518 - protein, 4 aa, SARS-CoV Virus
QSSL

SEQ ID NO: 1519 - protein, 7 aa, SARS-CoV Virus
AGCHGLS

SEQ ID NO: 1520 - protein, 4 aa, SARS-CoV Virus
SGST

SEQ ID NO: 1521 - protein, 12 aa, SARS-CoV Virus
TRGATKHRRFQN

SEQ ID NO: 1522 - protein, 15 aa, SARS-CoV Virus
GEICRTEACRCEAKN

SEQ ID NO: 1523 - protein, 8 aa, SARS-CoV Virus
GYHNTGRN

SEQ ID NO: 1524 - protein, 4 aa, SARS-CoV Virus
VSYQ

SEQ ID NO: 1525 - protein, 5 aa, SARS-CoV Virus
VTLVC

SEQ ID NO: 1526 - protein, 5 aa, SARS-CoV Virus
FSEHA

SEQ ID NO: 1527 - protein, 5 aa, SARS-CoV Virus
RYVFP

SEQ ID NO: 1528 - protein, 8 aa, SARS-CoV Virus
EGCTLHGR

SEQ ID NO: 1529 - protein, 15 aa, SARS-CoV Virus
YHLCCNTLQKGWWHY

SEQ ID NO: 1530 - protein, 11 aa, SARS-CoV Virus
DALKSFEESAS

SEQ ID NO: 1531 - protein, 15 aa, SARS-CoV Virus
VYNHVPWTRMCWLYT

SEQ ID NO: 1532 - protein, 14 aa, SARS-CoV Virus
EMQICILCTTFRST

SEQ ID NO: 1533 - protein, 18 aa, SARS-CoV Virus
GRDSRNCILEFERNACSC

SEQ ID NO: 1534 - protein, 12 aa, SARS-CoV Virus
RDKKINAYMHGC

SEQ ID NO: 1535 - protein, 8 aa, SARS-CoV Virus
SHNGNHPT

SEQ ID NO: 1536 - protein, 6 aa, SARS-CoV Virus
NSRGHR

SEQ ID NO: 1537 - protein, 9 aa, SARS-CoV Virus
LWCPILLLY

SEQ ID NO: 1538 - protein, 14 aa, SARS-CoV Virus
RACSFYYYEAELSK

SEQ ID NO: 1539 - protein, 14 aa, SARS-CoV Virus
AACHNANWLCDTWF

SEQ ID NO: 1540 - protein, 9 aa, SARS-CoV Virus
RGCALYAFS

SEQ ID NO: 1541 - protein, 16 aa, SARS-CoV Virus
SSCRSVSIITRCCYYI

SEQ ID NO: 1542 - protein, 10 aa, SARS-CoV Virus
WIPHFVIKDI

SEQ ID NO: 1543 - protein, 27 aa, SARS-CoV Virus
GALCRNSFFGWLLQRLVLFRTAYRVRC

SEQ ID NO: 1544 - protein, 15 aa, SARS-CoV Virus
QNCVPHSGEPRRVSS

SEQ ID NO: 1545 - protein, 4 aa, SARS-CoV Virus
GSFT

SEQ ID NO: 1546 - protein, 11 aa, SARS-CoV Virus
QTKESLIPAGG

SEQ ID NO: 1547 - protein, 11 aa, SARS-CoV Virus
DYKSVHNCGQH

SEQ ID NO: 1548 - protein, 24 aa, SARS-CoV Virus
SPHTACGYVYDIWTAVWSNILGWC

SEQ ID NO: 1549 - protein, 4 aa, SARS-CoV Virus
CYKN

SEQ ID NO: 1550 - protein, 5 aa, SARS-CoV Virus
TSCKS

SEQ ID NO: 1551 - protein, 6 aa, SARS-CoV Virus
DFLCTT

SEQ ID NO: 1552 - protein, 8 aa, SARS-CoV Virus
SFRVLPYS

SEQ ID NO: 1553 - protein, 4 aa, SARS-CoV Virus
EFSW

SEQ ID NO: 1554 - protein, 22 aa, SARS-CoV Virus
VHVCFKPHKEMEISSSWWFNFN

SEQ ID NO: 1555 - protein, 5 aa, SARS-CoV Virus
QLLFV

SEQ ID NO: 1556 - protein, 8 aa, SARS-CoV Virus
CFISTSTA

SEQ ID NO: 1557 - protein, 13 aa, SARS-CoV Virus
SQIQCTSTSRGLL

SEQ ID NO: 1558 - protein, 4 aa, SARS-CoV Virus
SPCW

SEQ ID NO: 1559 - protein, 9 aa, SARS-CoV Virus
LLCTHTRLQ

SEQ ID NO: 1560 - protein, 6 aa, SARS-CoV Virus
NCWRAW

SEQ ID NO: 1561 - protein, 12 aa, SARS-CoV Virus
CQRNYDPSSTAC

SEQ ID NO: 1562 - protein, 8 aa, SARS-CoV Virus
FGICKASS

SEQ ID NO: 1563 - protein, 23 aa, SARS-CoV Virus
TLWSENYYLNGCRSCDVYGYSIL

SEQ ID NO: 1564 - protein, 11 aa, SARS-CoV Virus
DRCFHSMCVWS

SEQ ID NO: 1565 - protein, 20 aa, SARS-CoV Virus
CYTISSTTRVFFCYDVCTTC

SEQ ID NO: 1566 - protein, 10 aa, SARS-CoV Virus
ITARYILMCE

SEQ ID NO: 1567 - protein, 11 aa, SARS-CoV Virus
LSVWSLHSYNC

SEQ ID NO: 1568 - protein, 6 aa, SARS-CoV Virus
GDPLSY

SEQ ID NO: 1569 - protein, 15 aa, SARS-CoV Virus
RSSPYKDVRVQRTSD

SEQ ID NO: 1570 - protein, 17 aa, SARS-CoV Virus
CFLQGNILHYNHQACVV

SEQ ID NO: 1571 - protein, 9 aa, SARS-CoV Virus
TRWSYLHRD

SEQ ID NO: 1572 - protein, 7 aa, SARS-CoV Virus
TKIGWVL

SEQ ID NO: 1573 - protein, 21 aa, SARS-CoV Virus
CLLYRAAYRPCTNSTITKCEF

SEQ ID NO: 1574 - protein, 6 aa, SARS-CoV Virus
FQTHMF

SEQ ID NO: 1575 - protein, 4 aa, SARS-CoV Virus
HKIC

SEQ ID NO: 1576 - protein, 30 aa, SARS-CoV Virus
FKSNDRLHKASFTRAICHILPRLEWRCSGY

SEQ ID NO: 1577 - protein, 10 aa, SARS-CoV Virus
TLFSEFQERC

SEQ ID NO: 1578 - protein, 6 aa, SARS-CoV Virus
ANCLAH

SEQ ID NO: 1579 - protein, 30 aa, SARS-CoV Virus
PGYNQDNVQTKHLVFTLSLEYKASRYFKFI

SEQ ID NO: 1580 - protein, 15 aa, SARS-CoV Virus
SSGSRRHTRNGQSCL

SEQ ID NO: 1581 - protein, 6 aa, SARS-CoV Virus
KSTTHL

SEQ ID NO: 1582 - protein, 15 aa, SARS-CoV Virus
RSSGKSYHTEGSHRV

SEQ ID NO: 1583 - protein, 12 aa, SARS-CoV Virus
RENYRSCRQCHT

SEQ ID NO: 1584 - protein, 7 aa, SARS-CoV Virus
SNTRVRS

SEQ ID NO: 1585 - protein, 14 aa, SARS-CoV Virus
GSYGCLCGKHKHYH

SEQ ID NO: 1586 - protein, 18 aa, SARS-CoV Virus
AFTSLRFKNNCHSWYCCN

SEQ ID NO: 1587 - protein, 4 aa, SARS-CoV Virus
CSLE

SEQ ID NO: 1588 - protein, 20 aa, SARS-CoV Virus
NFGLCQTILRTSSNYNIKLR

SEQ ID NO: 1589 - protein, 7 aa, SARS-CoV Virus
EISTTCV

SEQ ID NO: 1590 - protein, 17 aa, SARS-CoV Virus
QLYALCVYIIVPIVYFY

SEQ ID NO: 1591 - protein, 4 aa, SARS-CoV Virus
KYQF

SEQ ID NO: 1592 - protein, 8 aa, SARS-CoV Virus
SFTTYNYC

SEQ ID NO: 1593 - protein, 7 aa, SARS-CoV Virus
IMFGCRH

SEQ ID NO: 1594 - protein, 8 aa, SARS-CoV Virus
LCEVTQIF

SEQ ID NO: 1595 - protein, 30 aa, SARS-CoV Virus
IVHNRYVAIVVKYLLRFSNLCNCCFWCTLI

SEQ ID NO: 1596 - protein, 7 aa, SARS-CoV Virus
FWCSFLL

SEQ ID NO: 1597 - protein, 4 aa, SARS-CoV Virus
RIVS

SEQ ID NO: 1598 - protein, 7 aa, SARS-CoV Virus
RYYYGFL

SEQ ID NO: 1599 - protein, 15 aa, SARS-CoV Virus
RFFSLQHLFKWIRLP

SEQ ID NO: 1600 - protein, 5 aa, SARS-CoV Virus
FLSSS

SEQ ID NO: 1601 - protein, 20 aa, SARS-CoV Virus
NHSGDDFIVQARLDNFRSGR

SEQ ID NO: 1602 - protein, 29 aa, SARS-CoV Virus
VGFGIYVVHKILLFIRSFSYNAGVLWLFC

SEQ ID NO: 1603 - protein, 13 aa, SARS-CoV Virus
SFHQQFLAHVVYH

SEQ ID NO: 1604 - protein, 11 aa, SARS-CoV Virus
YCTNGTRFCNG

SEQ ID NO: 1605 - protein, 31 aa, SARS-CoV Virus
DVHLLCFFLLHMEELCSYHGWLHLFDLHDVL

SEQ ID NO: 1606 - protein, 7 aa, SARS-CoV Virus
AQSCHTR

SEQ ID NO: 1607 - protein, 5 aa, SARS-CoV Virus
VYNYC

SEQ ID NO: 1608 - protein, 27 aa, SARS-CoV Virus
WHEEIFLCLCKWRPWLLQDSQLELSQL

SEQ ID NO: 1609 - protein, 5 aa, SARS-CoV Virus
HILHW

SEQ ID NO: 1610 - protein, 5 aa, SARS-CoV Virus
FVTPV

SEQ ID NO: 1611 - protein, 6 aa, SARS-CoV Virus
KTNQPY

SEQ ID NO: 1612 - protein, 6 aa, SARS-CoV Virus
PVIVYC

SEQ ID NO: 1613 - protein, 12 aa, SARS-CoV Virus
CCCEKWRASPLL

SEQ ID NO: 1614 - protein, 7 aa, SARS-CoV Virus
QGWSKDL

SEQ ID NO: 1615 - protein, 15 aa, SARS-CoV Virus
ETSALPFCQFRQFES

SEQ ID NO: 1616 - protein, 5 aa, SARS-CoV Virus
RFTAY

SEQ ID NO: 1617 - protein, 4 aa, SARS-CoV Virus
CHSF

SEQ ID NO: 1618 - protein, 10 aa, SARS-CoV Virus
WQVQMRRVCF

SEQ ID NO: 1619 - protein, 17 aa, SARS-CoV Virus
VCFCVLQSADVPTYSVA

SEQ ID NO: 1620 - protein, 9 aa, SARS-CoV Virus
PSSCIKRWR

SEQ ID NO: 1621 - protein, 10 aa, SARS-CoV Virus
CLCRHLFSNF

SEQ ID NO: 1622 - protein, 6 aa, SARS-CoV Virus
CSYGKT

SEQ ID NO: 1623 - protein, 32 aa, SARS-CoV Virus
GTCCYSSQRVSKGCSFRWCPFYIRVSCPTRCC

SEQ ID NO: 1624 - protein, 5 aa, SARS-CoV Virus
HKGCY

SEQ ID NO: 1625 - protein, 8 aa, SARS-CoV Virus
MSQTFTSL

SEQ ID NO: 1626 - protein, 5 aa, SARS-CoV Virus
LRSDR

SEQ ID NO: 1627 - protein, 6 aa, SARS-CoV Virus
QFHAHL

SEQ ID NO: 1628 - protein, 11 aa, SARS-CoV Virus
KHDAQRSWRMY

SEQ ID NO: 1629 - protein, 27 aa, SARS-CoV Virus
CKAYQCPSSKKSQCFTHLECKRLHVFI

SEQ ID NO: 1630 - protein, 20 aa, SARS-CoV Virus
TNSYCCQEEQHTFYTNLCYN

SEQ ID NO: 1631 - protein, 8 aa, SARS-CoV Virus
TGCQCHNY

SEQ ID NO: 1632 - protein, 6 aa, SARS-CoV Virus
NLTQGW

SEQ ID NO: 1633 - protein, 24 aa, SARS-CoV Virus
GHIIVRSCCIGLLYRYASTYIVNP

SEQ ID NO: 1634 - protein, 4 aa, SARS-CoV Virus
WLHK

SEQ ID NO: 1635 - protein, 13 aa, SARS-CoV Virus
NHWLQSHSGWCHS

SEQ ID NO: 1636 - protein, 4 aa, SARS-CoV Virus
HHFY

SEQ ID NO: 1637 - protein, 4 aa, SARS-CoV Virus
LFCK

SEQ ID NO: 1638 - protein, 4 aa, SARS-CoV Virus
TCWF

SEQ ID NO: 1639 - protein, 8 aa, SARS-CoV Virus
PAWWFIQK

SEQ ID NO: 1640 - protein, 31 aa, SARS-CoV Virus
QKLPCSSCYHYKRDWFHSAWLTGYCAESNQW

SEQ ID NO: 1641 - protein, 9 aa, SARS-CoV Virus
LLAFSTSCF

SEQ ID NO: 1642 - protein, 13 aa, SARS-CoV Virus
CCWQHLLHTFQTH

SEQ ID NO: 1643 - protein, 10 aa, SARS-CoV Virus
FCYLCLRSCC

SEQ ID NO: 1644 - protein, 4 aa, SARS-CoV Virus
VYNF

SEQ ID NO: 1645 - protein, 11 aa, SARS-CoV Virus
GCYGQTCAILL

SEQ ID NO: 1646 - protein, 8 aa, SARS-CoV Virus
FARGFYFL

SEQ ID NO: 1647 - protein, 18 aa, SARS-CoV Virus
ASSRHSLCAYGWFHHTVS

SEQ ID NO: 1648 - protein, 7 aa, SARS-CoV Virus
HLPGGFC

SEQ ID NO: 1649 - protein, 5 aa, SARS-CoV Virus
SSNNF

SEQ ID NO: 1650 - protein, 17 aa, SARS-CoV Virus
TWYMRKVRSRYLPIYQW

SEQ ID NO: 1651 - protein, 12 aa, SARS-CoV Virus
ALQSSIRSFLWC

SEQ ID NO: 1652 - protein, 6 aa, SARS-CoV Virus
CDESHS

SEQ ID NO: 1653 - protein, 43 aa, SARS-CoV Virus
HLYSSCATCGCFRCVCFSSGWWYYCHIGDLCCLLLYEIQTCFW

SEQ ID NO: 1654 - protein, 7 aa, SARS-CoV Virus
VQPCCCC

SEQ ID NO: 1655 - protein, 37 aa, SARS-CoV Virus
CTFVFDVFHYTLSGTSLQLSAGSLLSLLLVLDILFHQ

SEQ ID NO: 1656 - protein, 38 aa, SARS-CoV Virus
CFILGSPSMVCHVFSYCAFLDNSNLCILYFSEALPLVL

SEQ ID NO: 1657 - protein, 5 aa, SARS-CoV Virus
EKSHV

SEQ ID NO: 1658 - protein, 4 aa, SARS-CoV Virus
WSYI

SEQ ID NO: 1659 - protein, 21 aa, SARS-CoV Virus
YLRGGCFVYLFAQQGNVPKIA

SEQ ID NO: 1660 - protein, 9 aa, SARS-CoV Virus
RDTVATYTV

SEQ ID NO: 1661 - protein, 6 aa, SARS-CoV Virus
QVSCSI

SEQ ID NO: 1662 - protein, 15 aa, SARS-CoV Virus
QVQVFQWSLRYYQLS

SEQ ID NO: 1663 - protein, 11 aa, SARS-CoV Virus
SSLLPLSKGSK

SEQ ID NO: 1664 - protein, 4 aa, SARS-CoV Virus
QLRC

SEQ ID NO: 1665 - protein, 19 aa, SARS-CoV Virus
CSLPTTTDINHFCCSAEWF

SEQ ID NO: 1666 - protein, 9 aa, SARS-CoV Virus
ENGIPVRQS

SEQ ID NO: 1667 - protein, 13 aa, SARS-CoV Virus
RVHGTSNLWNYNS

SEQ ID NO: 1668 - protein, 5 aa, SARS-CoV Virus
WIVVG

SEQ ID NO: 1669 - protein, 16 aa, SARS-CoV Virus
HSILSKTCHLHSRRHA

SEQ ID NO: 1670 - protein, 9 aa, SARS-CoV Virus
RSAHSQIQP

SEQ ID NO: 1671 - protein, 22 aa, SARS-CoV Virus
LSCSGWQCSTSCYWPFYAKLSA

SEQ ID NO: 1672 - protein, 4 aa, SARS-CoV Virus
DTQV

SEQ ID NO: 1673 - protein, 30 aa, SARS-CoV Virus
ICPYPTWSNIFSSSMLQWFTIWCLSVCHET

SEQ ID NO: 1674 - protein, 4 aa, SARS-CoV Virus
RFFP

SEQ ID NO: 1675 - protein, 4 aa, SARS-CoV Virus
WIMW

SEQ ID NO: 1676 - protein, 20 aa, SARS-CoV Virus
LRVFLLYASYGASNRSTRWY

SEQ ID NO: 1677 - protein, 6 aa, SARS-CoV Virus
ILWSIC

SEQ ID NO: 1678 - protein, 28 aa, SARS-CoV Virus
QTNCTGCRYRHNHNIKCFGMAVCCCYQW

SEQ ID NO: 1679 - protein, 6 aa, SARS-CoV Virus
IHHYFE

SEQ ID NO: 1680 - protein, 8 aa, SARS-CoV Virus
PCGNEVQL

SEQ ID NO: 1681 - protein, 7 aa, SARS-CoV Virus
TFDTRSC

SEQ ID NO: 1682 - protein, 35 aa, SARS-CoV Virus
HIGTSFCSNRNCRLRYVCCFERAAAEWYEWSYYPW

SEQ ID NO: 1683 - protein, 5 aa, SARS-CoV Virus
HYFRR

SEQ ID NO: 1684 - protein, 4 aa, SARS-CoV Virus
VYTI

SEQ ID NO: 1685 - protein, 9 aa, SARS-CoV Virus
TMLWCYLPR

SEQ ID NO: 1686 - protein, 5 aa, SARS-CoV Virus
VQENC

SEQ ID NO: 1687 - protein, 52 aa, SARS-CoV Virus
GHSSLDAFNFLDITIDSCSKYTVVTVFLCLRECFLAIYSWYYGNCCMCYAAC

SEQ ID NO: 1688 - protein, 18 aa, SARS-CoV Virus
ARILVLVSVTFSCNSCLL

SEQ ID NO: 1689 - protein, 6 aa, SARS-CoV Virus
YGLHAC

SEQ ID NO: 1690 - protein, 9 aa, SARS-CoV Virus
LGDAYHDMA

SEQ ID NO: 1691 - protein, 4 aa, SARS-CoV Virus
LVWL

SEQ ID NO: 1692 - protein, 21 aa, SARS-CoV Virus
GLCYVCFSFSFAYSHDSSHCL

SEQ ID NO: 1693 - protein, 18 aa, SARS-CoV Virus
TCLDTDECHYTCLQSLLW

SEQ ID NO: 1694 - protein, 17 aa, SARS-CoV Virus
CFRSSYFHVGLSYFCNL

SEQ ID NO: 1695 - protein, 12 aa, SARS-CoV Virus
LFWCRYDYHVFS

SEQ ID NO: 1696 - protein, 7 aa, SARS-CoV Virus
SYSVCVC

SEQ ID NO: 1697 - protein, 47 aa, SARS-CoV Virus
VLPIVIYYWQHLTVYHACLLFLRLLLLLLLWPFLFTQPLLQAYSWCL

SEQ ID NO: 1698 - protein, 8 aa, SARS-CoV Virus
LLGLYTRI

SEQ ID NO: 1699 - protein, 10 aa, SARS-CoV Virus
VYELPGAFAS

SEQ ID NO: 1700 - protein, 4 aa, SARS-CoV Virus
CFQA

SEQ ID NO: 1701 - protein, 6 aa, SARS-CoV Virus
VVGYWR

SEQ ID NO: 1702 - protein, 10 aa, SARS-CoV Virus
TMYQGCYCTV

SEQ ID NO: 1703 - protein, 15 aa, SARS-CoV Virus
RKVHICGTALGSSTT

SEQ ID NO: 1704 - protein, 5 aa, SARS-CoV Virus
SRVIF

SEQ ID NO: 1705 - protein, 10 aa, SARS-CoV Virus
IVGTMCTTPQ

SEQ ID NO: 1706 - protein, 8 aa, SARS-CoV Virus
YSSCKRHN

SEQ ID NO: 1707 - protein, 21 aa, SARS-CoV Virus
SFREDGFSFVCFAIHAGCCRH

SEQ ID NO: 1708 - protein, 7 aa, SARS-CoV Virus
VVRGNAR

SEQ ID NO: 1709 - protein, 11 aa, SARS-CoV Virus
PCYSSGYCFRI

SEQ ID NO: 1710 - protein, 15 aa, SARS-CoV Virus
FFTIICRLCHCPGGL

SEQ ID NO: 1711 - protein, 4 aa, SARS-CoV Virus
AGCS

SEQ ID NO: 1712 - protein, 13 aa, SARS-CoV Virus
SRSQKVKEIFECG

SEQ ID NO: 1713 - protein, 24 aa, SARS-CoV Virus
CCHATQVGKDGRSGYDPNVQTGKI

SEQ ID NO: 1714 - protein, 7 aa, SARS-CoV Virus
GQEGKSN

SEQ ID NO: 1715 - protein, 10 aa, SARS-CoV Virus
CYANNALHYA

SEQ ID NO: 1716 - protein, 7 aa, SARS-CoV Virus
QHYQQCA

SEQ ID NO: 1717 - protein, 21 aa, SARS-CoV Virus
WLCSTQHHTIDYSSQTHGCCP

SEQ ID NO: 1718 - protein, 8 aa, SARS-CoV Virus
LWYLQEHL

SEQ ID NO: 1719 - protein, 15 aa, SARS-CoV Virus
HLYICICTLGNPASC

SEQ ID NO: 1720 - protein, 5 aa, SARS-CoV Virus
QDCST

SEQ ID NO: 1721 - protein, 22 aa, SARS-CoV Virus
HGQFTKFGLASYCYSSKSQLSC

SEQ ID NO: 1722 - protein, 21 aa, SARS-CoV Virus
TESSSTTTDVLCGWYHTNSLY

SEQ ID NO: 1723 - protein, 6 aa, SARS-CoV Virus
QCTCLL

SEQ ID NO: 1724 - protein, 5 aa, SARS-CoV Virus
QFEGR

SEQ ID NO: 1725 - protein, 15 aa, SARS-CoV Virus
VCAGITIRPPRSQMG

SEQ ID NO: 1726 - protein, 13 aa, SARS-CoV Virus
WYRYNLHRTGTTL

SEQ ID NO: 1727 - protein, 9 aa, SARS-CoV Virus
VCYRHTKRA

SEQ ID NO: 1728 - protein, 14 aa, SARS-CoV Virus
SEILVLHQRLKQPK

SEQ ID NO: 1729 - protein, 38 aa, SARS-CoV Virus
RYGAGQFSCYSTSSGWKCYRSTCQFNCAFLLCFCSRPC

SEQ ID NO: 1730 - protein, 33 aa, SARS-CoV Virus
GLPSKWRTTNHQLCEDVVYTHWYRTGNYCNTRS

SEQ ID NO: 1731 - protein, 15 aa, SARS-CoV Virus
HGPRVLWWCFMLSVL

SEQ ID NO: 1732 - protein, 4 aa, SARS-CoV Virus
PSKS

SEQ ID NO: 1733 - protein, 9 aa, SARS-CoV Virus
VRPNTYHLC

SEQ ID NO: 1734 - protein, 6 aa, SARS-CoV Virus
PSGFYT

SEQ ID NO: 1735 - protein, 15 aa, SARS-CoV Virus
KHSLYRLRNVERLWL

SEQ ID NO: 1736 - protein, 2712 aa, SARS-CoV Virus
PTPRTLDAVCGCINVFKRVCGVSAARLTPCGTGTSTDVVYRAFDIYNEKSAGFAKFLKTNCCRFQEKDEEGNLLDSYFVVKRHTMSNYQHEETIYNLVKDCPAVAVHDFFKFRVDGDMVPHISRQRLTKYTMADLVYALRHFDEGNCDTLKEILVTYNCCDDDYFNKKDWYDFVENPDILRVYANLGERVRQSLLKTVQFCDAMRDAGIVGVLTLDNQDLNGNWYDFGDFVQVAPGCGVPIVDSYYSLLMPILTLTRALAAESHMDADLAKPLIKWDLLKYDFTEERLCLFDRYFKYWDQTYHPNCINCLDDRCILHCANFNVLFSTVFPPTSFGPLVRKIFVDGVPFVVSTGYHFRELGVVHNQDVNLHSSRLSFKELLVYAADPAMHAASGNLLLDKRTTCFSVAALTNNVAFQTVKPGNFNKDFYDFAVSKGFFKEGSSVELKHFFFAQDGNAAISDYDYYRYNLPTMCDIRQLLFVVEVVDKYFDCYDGGCINANQVIVNNLDKSAGFPFNKWGKARLYYDSMSYEDQDALFAYTKRNVIPTITQMNLKYAISAKNRARTVAGVSICSTMTNRQFHQKLLKSIAATRGATVVIGTSKFYGGWHNMLKTVYSDVETPHLMGWDYPKCDRAMPNMLRIMASLVLARKHNTCCNLSHRFYRLANECAQVLSEMVMCGGSLYVKPGGTSSGDATTAYANSVFNICQAVTANVNALLSTDGNKIADKYVRNLQHRLYECLYRNRDVDHEFVDEFYAYLRKHFSMMILSDDAVVCYNSNYAAQGLVASIKNFKAVLYYQNNVFMSEAKCWTETDLTKGPHEFCSQHTMLVKQGDDYVYLPYPDPSRILGAGCFVDDIVKTDGTLMIERFVSLAIDAYPLTKHPNQEYADVFHLYLQYIRKLHDELTGHMLDMYSVMLTNDNTSRYWEPEFYEAMYTPHTVLQAVGACVLCNSQTSLRCGACIRRPFLCCKCCYDHVISTSHKLVLSVNPYVCNAPGCDVTDVTQLYLGGMSYYCKSHKPPISFPLCANGQVFGLYKNTCVGSDNVTDFNAIATCDWTNAGDYILANTCTERLKLFAAETLKATEETFKLSYGIATVREVLSDRELHLSWEVGKPRPPLNRNYVFTGYRVTKNSKVQIGEYTFEKGDYGDAVVYRGTTTYKLNVGDYFVLTSHTVMPLSAPTLVPQEHYVRITGLYPTLNISDEFSSNVANYQKVGMQKYSTLQGPPGTGKSHFAIGLALYYPSARIVYTACSHAAVDALCEKALKYLPIDKCSRIIPARARVECFDKFKVNSTLEQYVFCTVNALPETTADIVVFDEISMATNYDLSVVNARLRAKHYVYIGDPAQLPAPRTLLTKGTLEPEYFNSVCRLMKTIGPDMFLGTCRRCPAEIVDTVSALVYDNKLKAHKDKSAQCFKMFYKGVITHDVSSAINRPQIGVVREFLTRNPAWRKAVFISPYNSQNAVASKILGLPTQTVDSSQGSEYDYVIFTQTTETAHSCNVNRFNVAITRAKIGILCIMSDRDLYDKLQFTSLEIPRRNVATLQAENVTGLFKDCSKIITGLHPTQAPTHLSVDIKFKTEGLCVDIPGIPKDMTYRRLISMMGFKMNYQVNGYPNMFITREEAIRHVRAWIGFDVEGCHATRDAVGTNLPLQLGFSTGVNLVAVPTGYVDTENNTEFTRVNAKPPPGDQFKHLIPLMYKGLPWNVVRIKIVQMLSDTLKGLSDRVVFVLWAHGFELTSMKYFVKIGPERTCCLCDKRATCFSTSSDTYACWNHSVGFDYVYNPFMIDVQQWGFTGNLQSNHDQHCQVHGNAHVASCDAIMTRCLAVHECFVKRVDWSVEYPIIGDELRVNSACRKVQHMVVKSALLADKFPVLHDIGNPKAIKCVPQAEVEWKFYDAQPCSDKAYKIEELFYSYATHHDKFTDGVCLFWNCNVDRYPANAIVCRFDTRVLSNLNLPGCDGGSLYVNKHAFHTPAFDKSAFTNLKQLPFFYYSDSPCESHGKQVVSDIDYVPLKSATCITRCNLGGAVCRHHANEYRQYLDAYNMMISAGFSLWIYKQFDTYNLWNTFTRLQSLENVAYNVVNKGHFDGHAGEAPVSIINNAVYTKVDGIDVEIFENKTTLPVNVAFELWAKRNIKPVPEIKILNNLGVDIAANTVIWDYKREAPAHVSTIGVCTMTDIAKKPTESACSSLTVLFDGRVEGQVDLFRNARNGVLITEGSVKGLTPSKGPAQASVNGVTLIGESVKTQFNYFKKVDGIIQQLPETYFTQSRDLEDFKPRSQMETDFLELAMDEFIQRYKLEGYAFEHIVYGDFSHGQLGGLHLMIGLAKRSQDSPLKLEDFIPMDSTVKNYFITDAQTGSSKCVCSVIDLLLDDFVEIIKSQDLSVISKVVKVTIDYAEISFMLWCKDGHVETFYPKLQASQAWQPGVAMPNLYKMQRMLLEKCDLQNYGENAVIPKGIMMNVAKYTQLCQYLNTLTLAVPYNMRVIHFGAGSDKGVAPGTAVLRQWLPTGTLLVDSDLNDFVSDADSTLIGDCATVHTANKWDLIISDMYDPRTKHVTKENDSKEGFFTYLCGFIKQKLALGGSIAVKITEHSWNADLYKLMGHFSWWTAFVTNVNASSSEAFLIGANYLGKPKEQIDGYTMHANYIFWRNTNPIQLSSYSLFDMSKFPLKLRGTAVMSLKENQINDMIYSLLEKGRLIIRENNRVVVSSDILVNN

SEQ ID NO: 1737 - protein, 1257 aa, SARS-CoV Virus
TNMFIFLLFLTLTSGSDLDRCTTFDDVQAPNYTQHTSSMRGVYYPDEIFRSDTLYLTQDLFLPFYSNVTGFHTINHTFGNPVIPFKDGIYFAATEKSNVVRGWVFGSTMNNKSQSVIIINNSTNVVIRACNFELCDNPFFAVSKPMGTQTHTMIFDNAFNCTFEYISDAFSLDVSEKSGNFKHLREFVFKNKDGFLYVYKGYQPIDVVRDLPSGFNTLKPIFKLPLGINITNFRAILTAFSPAQDIWGTSAAAYFVGYLKPTTFMLKYDENGTITDAVDCSQNPLAELKCSVKSFEIDKGIYQTSNFRVVPSGDVVRFPNITNLCPFGEVFNATKFPSVYAWERKKISNCVADYSVLYNSTFFSTFKCYGVSATKLNDLCFSNVYADSFVVKGDDVRQIAPGQTGVIADYNYKLPDDFMGCVLAWNTRNIDATSTGNYNYKYRYLRHGKLRPFERDISNVPFSPDGKPCTPPALNCYWPLNDYGFYTTTGIGYQPYRVVVLSFELLNAPATVCGPKLSTDLIKNQCVNFNFNGLTGTGVLTPSSKRFQPFQQFGRDVSDFTDSVRDPKTSEILDISPCSFGGVSVITPGTNASSEVAVLYQDVNCTDVSTAIHADQLTPAWRIYSTGNNVFQTQAGCLIGAEHVDTSYECDIPIGAGICASYHTVSLLRSTSQKSIVAYTMSLGADSSIAYSNNTIAIPTNFSISITTEVMPVSMAKTSVDCNMYICGDSTECANLLLQYGSFCTQLNRALSGIAAEQDRNTREVFAQVKQMYKTPTLKYFGGFNFSQILPDPLKPTKRSFIEDLLFNKVTLADAGFMKQYGECLGDINARDLICAQKFNGLTVLPPLLTDDMIAAYTAALVSGTATAGWTFGAGAALQIPFAMQMAYRFNGIGVTQNVLYENQKQIANQFNKAISQIQESLTTTSTALGKLQDVVNQNAQALNTLVKQLSSNFGAISSVLNDILSRLDKVEAEVQIDRLITGRLQSLQTYVTQQLIRAAEIRASANLAATKMSECVLGQSKRVDFCGKGYHLMSFPQAAPHGVVFLHVTYVPSQERNFTTAPAICHEGKAYFPREGVFVFNGTSWFITQRNFFSPQIITTDNTFVSGNCDVVIGIINNTVYDPLQPELDSFKEELDKYFKNHTSPDVDLGDISGINASVVNIQKEIDRLNEVAKNLNESLIDLQELGKYEQYIKWPWYVWLGFIAGLIAIVMVTILLCCMTSCCSCLKGACSCGSCCKFDEDDSEPVLKGVKLHYT

SEQ ID NO: 1738 - protein, 7 aa, SARS-CoV Virus
TNLWICL

SEQ ID NO: 1739 - protein, 12 aa, SARS-CoV Virus
DFLLLDQLLHSQ

SEQ ID NO: 1740 - protein, 43 aa, SARS-CoV Virus
KLTMLLLQVLFMLQQRYRYKPHSLSDGLLLALHFLLFFRALPK

SEQ ID NO: 1741 - protein, 8 aa, SARS-CoV Virus
LRSIKDGS

SEQ ID NO: 1742 - protein, 39 aa, SARS-CoV Virus
PFIRASSSFAIYCCYLLPSIHIFCLSLQVRRRNFCTSMP

SEQ ID NO: 1743 - protein, 13 aa, SARS-CoV Virus
YIFYNASTHVELL

SEQ ID NO: 1744 - protein, 169 aa, SARS-CoV Virus
DVGFVGSANPRTHYFMMPTTLFAGTHITMTTVYHITVSQIQLSLLKVTAFQHQNSKKTTKLVVILRIGTQVLKTMSLYMAISPKFTTSLSLHKLLQTLVLKMLHSSSLTSLLKTHRMCKYTQSTALQELLIQQWIQFMMSRRRLLACLCKHKKVSTNLCTHSFRKKQVR

SEQ ID NO: 1745 - protein, 14 aa, SARS-CoV Virus
LIAYFFFLLSWYSC

SEQ ID NO: 1746 - protein, 17 aa, SARS-CoV Virus
PSLLRFDCVRTAAILLT

SEQ ID NO: 1747 - protein, 12 aa, SARS-CoV Virus
NQRFTSTRVLKI

SEQ ID NO: 1748 - protein, 37 aa, SARS-CoV Virus
TLLKEFLIFWSKRTNYYYYSVWNFNIAYHGRQRYYYR

SEQ ID NO: 1749 - protein, 26 aa, SARS-CoV Virus
TTPGTMEPSNRFPIPSLDYVTTICLF

SEQ ID NO: 1750 - protein, 32 aa, SARS-CoV Virus; identical to SEQ ID NO: 527

SEQ ID NO: 1751 - protein, 19 aa, SARS-CoV Virus
LGDWRDCDCNGLYCRLDVA

SEQ ID NO: 1752 - protein, 42 aa, SARS-CoV Virus; identical to SEQ ID NO: 529

SEQ ID NO: 1753 - protein, 22 aa, SARS-CoV Virus
TCHWCCDHSWSLANGRTLPRAL

SEQ ID NO: 1754 - protein, 27 aa, SARS-CoV Virus
GPAKRDHCGYITNAFLLQIRSVAACRH

SEQ ID NO: 1755 - protein, 14 aa, SARS-CoV Virus
FRFCCIQPLPYWKL

SEQ ID NO: 1756 - protein, 7 aa, SARS-CoV Virus
IKYRPRR

SEQ ID NO: 1757 - protein, 24 aa, SARS-CoV Virus
QRQYCFASTVSDNRCFILLTSRLQ

SEQ ID NO: 1758 - protein, 12 aa, SARS-CoV Virus
GLSGLLFGILTL

SEQ ID NO: 1759 - protein, 6 aa, SARS-CoV Virus
DNYLSL

SEQ ID NO: 1760 - protein, 7 aa, SARS-CoV Virus
LRRIIRS

SEQ ID NO: 1761 - protein, 7 aa, SARS-CoV Virus
MMKNLWS

SEQ ID NO: 1762 - protein, 128 aa, SARS-CoV Virus
IIHKTNMKIILFLTLIVFTSCELYHYQECVRGTTVLLKEPCPSGTYEGNSPFHPLADNKFALTCTSTHFAFACADGTRHTYQLRARSVSPKLFIRQEEVQQELYSPLFLIVAALVFLILCFTIKRKTE

SEQ ID NO: 1763 - protein, 4 aa, SARS-CoV Virus
MSSL

SEQ ID NO: 1764 - protein, 7 aa, SARS-CoV Virus
LTSICAF

SEQ ID NO: 1765 - protein, 7 aa, SARS-CoV Virus
PFCYSLF

SEQ ID NO: 1766 - protein, 13 aa, SARS-CoV Virus
CLLYFGFHSKSRI

SEQ ID NO: 1767 - protein, 10 aa, SARS-CoV Virus
KNLVPKSKRT

SEQ ID NO: 1768 - protein, 5 aa, SARS-CoV Virus
NFSLF

SEQ ID NO: 1769 - protein, 11 aa, SARS-CoV Virus
LVFLYAVAYAL

SEQ ID NO: 1770 - protein, 93 aa, SARS-CoV Virus
YSAVHLINLMCLKILVRYNTRGNTYSTAWLCALGKVLPFHRWHTMVQTCTPNVTINCQDPAGGALIARCWYLHEGHQTAAFRDVLVVLNKRTN

SEQ ID NO: 1771 - protein, 7 aa, SARS-CoV Virus
WTPIKPT

SEQ ID NO: 1772 - protein, 13 aa, SARS-CoV Virus
CPPHYIWWTHRFN

SEQ ID NO: 1773 - protein, 20 aa, SARS-CoV Virus
PEWRTQWGKAKTAPTPRFTQ

SEQ ID NO: 1774 - protein, 16 aa, SARS-CoV Virus
YCVLVHSSHSAWQGGT

SEQ ID NO: 1775 - protein, 12 aa, SARS-CoV Virus
IPSRPGRSNQHQ

SEQ ID NO: 1776 - protein, 15 aa, SARS-CoV Virus
PNWLLPKSYPTSSWW

SEQ ID NO: 1777 - protein, 27 aa, SARS-CoV Virus
RQNERAQPQMVLLLPRNWPRSFTSLRR

SEQ ID NO: 1778 - protein, 9 aa, SARS-CoV Virus
QRRHRMGCN

SEQ ID NO: 1779 - protein, 15 aa, SARS-CoV Virus
GSLEYTQRPHWHPQS

SEQ ID NO: 1780 - protein, 36 aa, SARS-CoV Virus
QCCHRATTSSRNNIAKRLLRRGKQRRQSSLFSLLIT

SEQ ID NO: 1781 - protein, 9 aa, SARS-CoV Virus
FKKFNSWQQ

SEQ ID NO: 1782 - protein, 8 aa, SARS-CoV Virus
GKFSCSNG

SEQ ID NO: 1783 - protein, 14 aa, SARS-CoV Virus
NCPRAIAARQIEPA

SEQ ID NO: 1784 - protein, 5 aa, SARS-CoV Virus
EQSFW

SEQ ID NO: 1785 - protein, 10 aa, SARS-CoV Virus
RPTTTRPNCH

SEQ ID NO: 1786 - protein, 4 aa, SARS-CoV Virus
EICC

SEQ ID NO: 1787 - protein, 40 aa, SARS-CoV Virus
KASPKTYCHKTVQRHSSIWETWSRTNPRKFRGPRPNQTRN

SEQ ID NO: 1788 - protein, 40 aa, SARS-CoV Virus
LQTLAANCTICSKCLCILWNVTHWHGSHTFGNMADLSWSH

SEQ ID NO: 1789 - protein, 16 aa, SARS-CoV Virus
QRSTIQRQRHTAEQAH

SEQ ID NO: 1790 - protein, 10 aa, SARS-CoV Virus
RIQNIPTNRA

SEQ ID NO: 1791 - protein, 7 aa, SARS-CoV Virus
KGQKEKD

SEQ ID NO: 1792 - protein, 20 aa, SARS-CoV Virus
SSAFAAETKEAAHCDSSSCG

SEQ ID NO: 1793 - protein, 14 aa, SARS-CoV Virus
FLQTTSKFHEWSFC

SEQ ID NO: 1794 - protein, 39 aa, SARS-CoV Virus
FNSGINTHDDHTRQMGYVNVFAIPFTIHSLLLCRMNSRN

SEQ ID NO: 1795 - protein, 12 aa, SARS-CoV Virus
TAQVGLVNFNLT

SEQ ID NO: 1796 - protein, 6 aa, SARS-CoV Virus
QSLINV

SEQ ID NO: 1797 - protein, 21 aa, SARS-CoV Virus
GGLERATTFSSRPRGVRSRVQ

SEQ ID NO: 1798 - protein, 12 aa, SARS-CoV Virus
IMLGRAAYMEEP

SEQ ID NO: 1799 - protein, 20 aa, SARS-CoV Virus
CVKLILVVLSPCDFNSFLGE

SEQ ID NO: 1800 - protein, 5 aa, SARS-CoV Virus
QKKKK

SEQ ID NO: 1801 - DNA, 29742 bp, SARS-CoV Virus
  CDS (1)..(29742)
tttttttttttttttgtcattctcctaagaagctattaaaatcacatggggatagcactactaaaattaattttacacattagggctcttccatataggcagctctccctagcattattcactgtaccctcgatcgtactccgcgtggcctcgatgaaaatgtggtggctctttcaagtcctccctaatgttacacattgattaaagattgctatgtgagattaaagttaactaaacctacttgtgctgtttagttacgagaattcattctgcacaagagtagactatgtatcgtaaacggaattgcgaaaacgtttacatagcccatctgccttgtgtggtcatcatgagtgtttatgcctgagttgaatcagcagaagctccactcatggaattttgaagttgtctggagaaatcatccatgtcagccgcaggaagaagagtcacagtgggctgcttcttttgtctctgcggcaaaggctgagcttcatcagtctttttctttttgtcctttttaggctctgttggtgggaatgttttgtatgcgtcaatgtgcttgttcagcagtatgacgttgtctttgaattgtggatctttgtcatccaatttaatggctccatgataagtcagccatgttcccgaaggtgtgacttccatgccaatgcgtgacattccaaagaatgcagaggcacttggagcaaattgtgcaatttgcggccaatgtttgtaatcagttccttgtctgattaggtcttggtccccgaaatttccttgggtttgttctggaccacgtctcccaaatgcttgagtgacgttgtactgttttgtggcagtacgtttttggcgaggctttttagatgcctcagcagcagatttcttagtgacagtttggccttgttgttgttggcctttaccagaaactttgctctcaagctggttcaatctgtctagcagcaatagcgcgagggcagtttcaccacctccgctagccattcgagcaggagaatttcccctactgctgccaggagttgaatttcttgaattaccgcgactacgtgatgaggagcgagaagaggcttgactgccgcctctgcttccctctgcgtagaagccttttggcaatgttgttccttgaggaagttgtagcacggtggcagcattgttattaggattgcgggtgccaatgtggtctttgggtgtattcaaggctccctcagttgcaacccatacgatgccttctttgttagcgccgtagggaagtgaagcttctgggccagttcctaggtaatagaagtaccatctggggctgagctctttcattttgccgtcaccaccacgaactcgtcgggtagctcttcggtagtagccaatttggtcatctggaccactattggtgttgattggaacgccctggcctcgagggaatctaagttcctccttgccatgctgagtgagagctgtgaaccaagacgcagtattattgggtaaaccttggggtcggcgctgttttggccttgccccattgcgtcctccattctggttattgtcagttgaatctgtgggtccaccaaatgtaatgcggggggcactacgttggtttgattggggtccattatcagacattttaatttgttcgtttatttaaaacaacaagtacgtctctaaatgcagcagtttggtgaccttcatgaaggtaccaacacctagctataagcgcaccaccagctggatcttgacagttgatagtaacattaggtgtgcatgtttgaaccatagtgtgccatctatgaaaaggtaaaacctttcctagagcacaaagccaagcagtgctataagtattacccctagtgttgtaccttacaaggatcttcaagcacatgaggtttattagatgcacagcgctgtactacagtgcatatgcaactgcatagagaaatacaagtcaaaacaatgagaagtttcatgttcgtttagactttggtacaaggttcttctagatcctggatttcgagtgaaaaccaaaatataataagcattattaaaacaaggaatagcagaaaggctaaaaagcacaaatagaagtcaattaaagtgagctcattcattctgtctttctcttaatggtgaagcaaagtattaaaaatactagagcagcaacaatgagaaaaagtggcgagtagagctcttgttgaacctcctcttgtctgatgaaaagttttggtgaaactgatcttgcacgcagctgataggtatgtcgagtaccgtcagcacaagcaaaagcaaagtgtgtgctagtgcaagttagtgcaaatttattgtcagcaagagggtgaaatggtgaattgccctcgtatgttcctgatgggcaaggttcttttagtagtacagtcgtacctctaacacactcctgatagtgatatagctcgcaagatgtaaatacaatcaatgtcaggaagagaataattttcatgttcgttttatggataatctaactccataggttcttcatcatctaactccgaataattcttcttagttagaggcttaaataattgtctcactattgaacttattataacgtcaagattccaaatagcaatcctgaaagtcctcataatgataatcaatatctctgctattgtaacctggaagtcaacaagatgaaacatctgttgtcacttactgtactagcaaagcaatattgtcgttgctaccggcgtggtctgtatttaatttatagtttccaatacggtagcggttgtatgcagcaaaacctgaatcagtgcctacacgctgcgacgctcctaatttgtaataagaaagcgttcgtgatgtagccacagtgatctcttttggcaggtccttaatgtcacagcgccctagggagtgtccggccattcgcaagtgaccacgaatgatcacagcaccaatgacaagttcactttccatgagcggtctggtcacaattgtcccccggagaggcacattgagaagaatgtttgtttctgggttgaatgaccacattgagcgggtacgagcaaacagcctgaaggaagcaacgaagtagctaagccacatcaagcctacaatacaagccattgcaatcgcaatcccgccagtcacccaattaattctgtagacaacagcaagcacaaaacaagcaagtgttactggccacaagagccagaggaaaacaagctttattatgtacaaaaacctgttccgattagaataggcaaattgtagtaacataatccaggctaggaataggaaacctattactaggttccattgttccaggagttgtttaagctcctcaacggtaatagtaccgttgtctgccatgataagcaatgttaaagttccaaacagaataataataatagttagttcgtttagaccagaagatcaggaactccttcagaagagttcagatttttaacacgcgagtagacgtaaaccgttggttttactaaactcacgttaacaatattgcagcagtacgcacacaatcgaagcgcagtaaggatggctagtgtgactagcaagaataccacgaaagcaagaaaaagaagtacgctattaactattaacgtacctgtttcttccgaaacgaatgagtacataagttcgtactcactttcttgtgcttacaaaggcacgctagtagtcgtcgtcggctcatcataaattggatccattgctggattagcaactcctgaagagccgtcgattgtgtgtatttgcacattcggtgggtctttaacaagcttgttaaagatgaagaatgtagcattttcaataccagtgtctgtagtaatttgtgtagactcaagctggtagtaaacttcggtgaaatagccatgtacaacgacatagtctttaacacctgagtgcctatcctcagaataaccaccaatttggtagtcttctttgagttttggtgttgaaatgccgtcaccttcagtaacgacaattgtatctgtgacactgttatatggtatacagtagtcatagttatgtgtgtgccagcaaacaaagtagttggcatcataaagtaatgggttcttggatttgcacttccaacaaagccaacatctcataataattctacatgcgttgatgcattgtagaaaatatatcaaggcatagaggtacaaaaattgcgcctccttacctgcagcgacaagcaaaagatgtgaatagatggtaacaaatagcagcagtaaattgcaaatgaactggaagcccttataaagggctagctgccatcttttattgagcgcaattattttggtagcgctctgaaaaacagcaagaaatgcaacgccaataacaagccatccgaaagggagtgaggcttgtagcggtatcgttgctgtagcatgaacagtacttgcaggagaagcattgtcaatttttactggctgtgcagtaattgatccaagagtaaaaaatctcataaacaaatccataagttcgtttatgtgtaatgtaatttgacacccttgagaactggctcagagtcatcctcatcaaacttgcagcaagaaccacaagagcatgcacccttgaggcaactgcaacaactagtcatgcaacaaagcaagattgtaaccatgacgatggcaattagtccagcaatgaagccgagccaaacataccaaggccatttaatatattgctcatattttcccaattcttgaaggtcaatgagtgattcatttaaatttttagcgacctcattgaggcggtcaatttctttttgaatgttgacgacagaagcgttaatgcctgaaatgtcgccaagatcaacatctggtgatgtatgatttttgaagtacttgtccagctcttctttgaatgagtcaagctcaggttgcagaggatcataaactgtgttgttaatgatgccaataacgacatcacaatttcctgagacaaatgtattgtctgtagtaattatttgtggagaaaagaagttcctctgtgtaataaaccaagaagtgccattaaacacaaaaacaccttcacgagggaagtatgctttgccttcatgacaaattgctggcgctgtggtgaagttcctctcctgggatggcacatacgtgacatgtaggaagacaacaccatgcggggctgcttgtgggaaggacataaggtggtagccctttccacaaaagtcaactctttttgattgtccaagaacacactcagacattttagtagcagcaagattagcagaagccctgatttcagcagccctgattagttgttgtgttacataggtttgaaggctttgaagtctgcctgtaattaacctgtcaatttgtacctccgcctcgactttatcaagtcgcgaaaggatatcatttagcacacttgaaattgcaccaaaattagagctaagttgtttaacaagtgtgtttaatgcttgagcattctggttaacaacgtcttgcagcttgcccaatgcagttgatgttgttgtaagtgattcttgaatttgactaatcgccttgttaaattggttggcgatttgtttttggttctcatagagaacattttgggtaactccaatgccattgaacctatatgccatttgcatagcaaaaggtatttgaagagcagcgccagcaccaaatgtccatccagcagtggcagtaccactaactagagcagcagtgtaggcagcaatcatatcatcagtgagcagaggtggcaacactgtaagtccattgaacttctgcgcacaaatgagatctctagcattaatatcacctaggcattcgccatattgcttcatgaagccagcatcagcgagtgtcaccttattaaagagcaagtcctcaataaaagacctcttagttggctttagagggtcaggtaatatttgtgaaaaattaaaaccaccaaaatatttcaaagttggggttttgtacatttgtttgacttgagcgaacacttcacgtgtgttgcgatcctgttcagcagcaatacctgagagtgcacgatttagttgtgtgcaaaagctaccatattggagaagcaaattagcacattcagtagaatctccgcagatgtacatattacaatctacggaggttttagccatagaaacaggcattacttctgtagtaatgctaattgaaaagttagtaggtatagcaatggtgttattagagtaagcaattgaactatcagcacctaaagacatagtataagccacaatagatttttggctagtactacgtaataaagaaactgtatggtaactagcacaaatgccagctccaataggaatgtcgcactcataagaagtgtcgacatgctcagctcctataagacagcctgcttgagtctggaatacattgtttccagtagaatatatgcgccaagctggtgtgagttgatctgcatgaattgctgtagaaacatcagtgcagttaacatcttgatatagaacagcaacttcagatgaagcatttgttccaggtgtaattacacttacacccccaaaagagcaaggtgaaatgtctaatatttcagatgttttaggatctcgaacggaatcagtgaaatcagaaacatcacggccaaattgttgaaatggttgaaatctctttgaagaaggagttaacacaccagtaccagtgagtccattaaaattaaaattgacacactggttcttaataaggtcagtggataattttggtccacaaaccgtggccggtgcatttaaaagttcaaaagaaagtactacaactctgtaaggttggtagccaatgccagtagtggtgtaaaaaccataatcatttaatggccaataacaattaagagcaggtggggtgcaaggtttgccatcaggggagaaaggcacattagatatgtctctctcaaagggcctaagcttgccatgtctaagatacctatatttataattataattaccagttgaagtagcatcaatgttcctagtattccaagcaaggacacaacccatgaaatcatctggcaatttataattataatcagcaataacaccagtttgtcctggcgctatttgtcttacatcatctcccttgactacaaaagaatctgcatagacattggagaagcaaagatcattcaacttagtggcagaaacgccatagcacttaaaggttgaaaaaaatgttgagttgtagagcacagagtaatcagcaacacaattagaaattttttttctctcccatgcatagacagaagggaatttagtagcattaaaaacctctccaaaaggacacaagtttgtaatattagggaatctcacaacatctcctgagggaacaaccctgaaattagaggtctggtaaattcctttgtcaatctcaaagctcttaacagagcatttgagttcagcaagtggattttgagaacaatcaacagcatctgtgattgtaccattttcatcatacttgagcataaatgtagttggctttaaatagccaacaaaataggctgcagctgacgtgccccaaatgtcttgagcaggtgaaaaggctgtaagaatggctctaaaatttgtaatgttaataccaagaggcaacttaaaaataggtttcaaagtgttaaaaccagaaggtagatcacgaactacatctataggttgatagcccttataaacatagagaaacccatctttatttttaaacacaaactctcgtaagtgtttaaaattacctgacttttctgaaacatcaagcgaaaaggcatcagatatgtactcgaaagtgcaattaaatgcattatcgaatatcatagtatgtgtctgtgtacccatgggtttagaaacagcaaagaaagggttgtcacacaattcaaagttacatgctcgtataacaacattagtagaattgttaataataatcaccgactgtgacttgttgttcatggtagaaccaaaaacccaaccacggacaacatttgatttctctgtggcagcaaaataaataccatccttaaaaggtatgacagggttgccaaacgtatgattaatagtatgaaaccctgtaacattagaataaaatggaagaaataaatcctgagttaaataaagagtgtctgatctaaaaatttcatcaggatagtaaacccccctcatagatgaagtatgttgagtgtaattaggagcttgaacatcatcaaaagtggtgcaccggtcaaggtcactaccactagtgagagtaagaaataataagaaaataaacatgttcgtttagttgttaacaagaatatcacttgaaaccacaactctgttgttttctctaatgataagcctacctttttccagaagagaataaatcatatcattgatttgattctccttaagagacattacagcagttcctcttaatttaagaggaaatttgctcatgtcaaagagtgaataggaagacaactggataggatttgtgttcctccagaaaatgtagttagcatgcatggtatagccatcaatttgttccttcggcttgccaagatagttagccccaattaaaaatgcttccgatgatgatgcatttacatttgtaacaaaagctgtccaccatgagaaatggcccataagcttgtaaaggtcagcattccaagaatgctctgttatctttacagctatagaaccacccagggctagtttttgctttataaatccacacagataagtgaaaaacccttctttagagtcattctcttttgtcacatgtttggtcctagggtcatacatatcgctaataataaggtcccatttattagccgtatgtactgttgcacagtctccaattaaagtagaatctgcgtcggagacgaagtcattaagatctgaatcgacaagtagtgtgccagttggcaaccattgtctgagcacagctgtacctggtgcaactcctttatcagagccagcaccaaagtgaataactctcatgttgtagggtacagctaaagtaagtgtatttaagtattgacacagttgagtatactttgcgacattcatcattattccttttggtataacagcattttcaccataattctgaaggtcacacttttcaagaagcattctttgcatcttgtacaagttaggcatcgcaacacctggttgccacgcttgacttgcttgtagttttgggtagaaggtttcaacatgtccatccttacaccaaagcatgaatgaaatttcagcatagtcaattgtaaccttgaccacttttgaaatcactgacaaatcttgtgactttattatctcgacaaagtcatcaagtaaaagatcaatcacagaacacacacattttgatgaacctgtttgcgcatctgttatgaagtaatttttcactgtgctgtccatagggataaaatcctctaatttaagtggtgaatcttgtgagcgcttggctaagcctatcattaaatgaagaccgccaagttgtccatgactgaaatctccataaacgatgtgttcgaaggcatagccctcgagcttatatcgctgtatgaattcatccatagcgagctcgagaaagtcagtttccatttgtgatctgggcttaaaatcctctaagtctctgctctgagtaaagtaggtttcaggcaactgttgaataatgccgtctactttcttaaagtagttaaactgtgtttttactgattctccaattaatgtgactccattgacgctagcttgtgctggtccctttgaaggtgttagacctttgactgaaccttctgttattaaaacaccattacgggcgtttctaaaaaggtctacctgtccttccactctaccatcaaacaagacagtaagtgaagaacaagcactctcagtaggtttcttggcaatgtcagtcattgtgcagacacctattgtagatacatgtgctggggcttctcttttgtagtcccagattacagtattagcagcgatatcaacacccaaattattgagtatcttaatctctggcactggtttaatgttacgcttagcccaaagctcaaatgcaacattaacaggaagtgttgtcttattttcaaagatctccacatcaataccatctacctttgtgtaaacagcattattaatgatggaaacaggtgcttcgccggcgtgtccatcaaagtgtcctttattaacaacattataagccacattttctaaactctgtaacctggtaaatgtattccacaggttataagtatcaaattgtttgtaaatccataggctaaatccagcagaaatcatcatattatatgcatccaagtactgtcggtactcatttgcatggtgtctgcaaacagcaccacctaaattgcatcgtgtaatacacgtagcagatttgagtggaacataatcaatatccgacactacttgtttgccatgagactcacaaggactatcagaatagtaaaagaaaggcaattgctttaaattagtaaatgcacttttatcgaaagctggagtgtggaatgcatgcttattcacatacaaactaccaccatcacagcctggtaagttcaagtttgacaagactcttgtgtcaaacctacacacaattgcattggctgggtaacgatcaacgttacaattccaaaacaaacaaacaccatcagtgaatttatcgtgatgtgtagcataagaatagaagagttcctctattttgtaagctttgtcactacatggctgagcatcgtagaacttccattctacttcagcctgaggcacacacttgatagcctttggatttccaatgtcatgaagaactggaaacttatcagcaagcaatgcagacttcacaaccatgtgttgtacttttctgcaagcagaattaaccctcagttcatctcctataatagggtattcaacagaccaatcaacgcgcttaacaaagcactcatggactgctaaacatctagtcatgatagcatcacaactagccacatgtgcatttccatgtacctggcaatgttggtcatggttactctgaaggttacccgtaaagccccactgctgaacatcaatcataaatgggttatagacatagtcaaaacccacagaatgattccagcaggcataagtatctgatgaagtagaaaagcaagttgcacgtttgtcacacagacaacacgttctttcaggtccaatcttgacaaagtacttcattgatgtaagctcaaagccatgcgcccaaaggacgaacacgactctgtctgacaatcctttcagtgtatcactgagcatttgtactatcttaatacgcactacattccagggcaagcctttatacatgagtggtataagatgtttaaactggtcacctggtggaggttttgcattaactctggtgaattctgtgttattttcagtgtcaacataaccagtcggtacagctactaagttaacacctgtagaaaatcctagctggagaggtaggttagtacccacagcatctctagttgcatgacagccctctacatcaaagccaatccacgcacgaacgtgacgaatagcttcttcgcgggtgataaacatattagggtaaccattgacttggtaattcattttgaaacccatcatagagatgagtctacggtaggtcatgtcctttggtatgcctggtatgtcaacacataatccttcagtcttgaattttatatcaacgctgaggtgtgtaggtgcctgtgtaggatgaagaccagtaatgatcttactacagtccttaaaaagtccagttacattttctgcttgtaatgtagccacattgcgacgtggtatttctagacttgtaaattgcagtttgtcataaagatctctatcagacattatgcacaaaatgccaatttttgcccttgtgatagccacattgaagcggttgacattacaagagtgtgctgtttcagtagtttgtgtgaatatgacatagtcatattcagaaccctgtgatgaatcaacagtctgcgtaggcaatcctaagatttttgaagctacagcgttctgtgaattataaggtgagataaaaacagcttttctccaagcaggattgcgtgtaagaaattctcttacaacgcctatttgaggtctgttgattgcagatgaaacatcatgtgtaataacacctttgtagaacattttgaagcattgagctgacttatccttgtgtgcttttagcttattgtcataaactaaagcactcacagtgtcaacaatttcagcaggacaacggcgacaagttccaaggaacatgtctggacctattgttttcataagtctgcacactgaattaaaatattctggttctagtgtgcctttagtcagcaatgtgcggggggctggtaattgagcaggatcgccaatatagacgtagtgttttgcacgaagtctagcattgacaacactcaagtcataattagtagccatagagatttcatcaaagactacaatgtcagcagttgtttctggcaatgcatttacagtgcagaaaacatactgttctagtgttgaattcactttgaatttatcaaaacactctacgcgcgcacgcgcaggtatgattctactacatttatctatgggcaaatattttaatgccttttcacatagggcatcaacagctgcatgagagcatgccgtatacactatgcgagcagatgggtaatagagagcaagtccgatggcaaaatgactcttaccagtaccaggtggtccttggagtgtagagtacttttgcatgccgaccttttgataatttgcaacattgctagaaaactcatctgagatgttgagtgttgggtacaagccagtaattctcacatagtgctcttgtggcactagagtaggtgcactaagtggcattacagtgtgagatgtcaacacaaagtaatcaccaacattcaacttgtatgtcgtagtacctctgtacacaacagcatcaccatagtcacctttttcaaaggtgtactctccaatctgtactttactatttttagttacacggtaaccagtaaagacatagtttctgttcaatggtggtctaggttttccaacctcccatgaaagatgcaattctctgtcagagagtacttcgcgtacagtggcaataccatatgacagcttaaatgtttcctcagtggctttgagcgtttctgctgcgaaaagcttgagtctctcagtacaagtgttggcaagtatgtaatcgccagcattagtccaatcacatgttgctatcgcattgaagtcagtgacattgtcactgcctacacatgtgtttttgtataaaccaaaaacctgaccattagcacataatggaaaactaatgggaggcttatgtgacttgcaataatagctcatacctcctagatacagttgtgtcacatcagtgacatcacaacctggggcattgcaaacatagggattaacagacaacactaatttgtgtgatgttgaaatgacatggtcatagcagcacttgcaacataggaatggtctcctaatacaggcaccgcaacgaagtgaagtctgtgaattgcacaatacacaagcacctacagcctgcaagactgtatgtggtgtgtacatagcctcataaaactcaggttcccagtaccgtgaggtgttatcattagttagcattacggaatacatgtccaacatgtggccagtaagctcatcatgtaactttctaatgtattgtaaatacaagtgaaagacatcagcatactcctgattaggatgttttgtaagtgggtaagcatcaatagccagtgacacgaacctttcaatcataagtgtaccatctgttttgacaatatcatcgacaaaacagcctgcgcctaatattcttgatggatctgggtaaggcaggtacacgtaatcatctccttgtttaactagcattgtatgctgtgagcaaaattcgtgaggtcctttagtaaggtcagtctcagtccaacattttgcctcagacatgaacacattattttgataataaagaactgccttaaagttcttaatgctagctactaaaccttgagccgcatagttactgttatagcacacaacggcatcatcagaaagaatcatcatggagaaatgtttacgcaggtaagcgtaaaactcatccacgaattcatgatcaacatccctatttctatagagacactcatagagcctgtgttgtagattgcggacatacttgtcagctatcttattaccatcagttgaaagaagtgcatttacattggctgtaacagcttgacaaatgttaaagacactattagcataagcagttgtagcatcaccggatgatgttccacctggtttaacatatagtgagccgccacacatgaccatctcacttaatacttgcgcacactcgttagctaacctgtagaaacggtgtgataagttacagcaagtgttatgtttgcgagcaagaacaagagaggccattatcctaagcatgttaggcatggctctgtcacattttggataatcccaacccataaggtgtggagtttctacatcactgtaaacagtttttaacatattatgccagccaccgtaaaacttgcttgttccaattaccacagtagctcctctagtggcggctattgacttcaataatttctgatgaaactgtctatttgtcatagtactacagatagagacaccagctacggtgcgagctctattctttgcactaatggcatacttaagattcatttgagttatagtagggatgacattacgcttagtatacgcgaaaagtgcatcttgatcctcataactcattgagtcataataaagtctagccttaccccatttattaaatgggaaaccagctgatttatccagattgttaacgattacttggttggcattaatacagccaccatcgtaacaatcaaagtatttatcaacaacttcaactacgaataggagttgtctgatatcacacattgttggcagattataacgataatagtcataatcactgatagcagcgttgccatcctgagcaaagaagaagtgttttagttcaacagaacttccttccttaaagaaacctttagacacagcaaagtcataaaagtctttattaaaattaccgggtttgacagtttgaaaagcaacattgtttgttagtgcagctactgaaaagcatgtagtgcgtttatctagcaataaattgccagaagctgcatgcatagctggatcagcagcatacactaaaagttccttgaaactgagacgcgagctatgtaagtttacatcctgattatgtacgactcctaactcacgaaaatggtatccagttgaaacaacaaaaggaacaccatctacaaatatttttcttactagtggtccaaaacttgtaggtggaaacacagtagaaaataacacattaaagtttgcacaatgaaggatacacctatcatccaaacagttaatacaattgggatggtatgtctggtcccaatatttaaaataacggtcgaagagacaaagtctctcttccgtaaaatcatatttcagcaaatcccacttaataagtggttttgcgagatcagcatccatatgggactcagcagccaatgccctagtcaaagtgaggatgggcatcagcaatgagtaatatgaatccacaataggaactccgcagcctggtgctacttgtacgaaatcaccgaaatcgtaccagttcccattaagatcctgattatctaatgtcagtacgcctacaatgcctgcatcacgcatagcatcgcagaattgtacagtctttaataatgattggcgtacacgctcacctaagttagcatatacgcgtaagatgtcaggattctctacgaagtcataccaatccttcttattgaaataatcatcatcacagcaattgtatgtgacgagtatttcttttaatgtatcacaattaccctcatcaaaatgacgtagagcatagactaaatcagccattgtgtatttagttagacgctgacgtgatatatgtggtaccatgtcaccatctactctaaacttgaaaaagtcatggacagcaaccgctggacaatctttaaccaagttataaatagtctcttcatgttggtagttagacatagtatgcctcttaactacaaagtaagagtctaataaattgccttcctcatccttctcctggaagcgacagcaattagtttttaggaactttgcaaaaccagcacttttttcgttgtaaatatcaaaagccctgtagacgacatcagtactagtgcctgtgccgcacggtgtaagacgggctgcacttacaccgcaaacccgtttaaaaacgttgatgcatccgcagactgcatcaagggttcgcggagttggtcacaactacagccataacctttccacattccgcagacggtacagactgtgtttctaagtgtaaaacccactgggtcattagcacaagtggtaggtatttggacgtacttacctttcaagtcacagaatcctttaggatttggatggtcaatgtggcatctacaatacagacaacatgaagcaccaccaaaggactcttggtccatgttagcttctggtgttacagtaattgcctgtcctgtaccagtgtgtgtacacaacatcttcacacagttggtgattggttgtcctccacttgctaggtaatccttatatgctttagcagggtctactgcaaaagcacagaaggaaagcacagttgaattggcaggtacttctgtagcatttccagcctgaagacgtactgtagcagctaaactgcccagcaccatacctctatttaggttgtttaagcctttgatgaagtacaagtatttcactttaggcccttttggtgtgtctgtaacaaacctacaaggtggttccagttctgtgtaaattgtacctgtaccatcactcttagggaatctagcccatttgagatcttggtggtctgatagtaatgccagcacaaacctacctcccttcgaattgttatagtaggcaagtgcattgtcatcagtacaagctgtttgtgtggtaccagccgcacaggacatctgtcgtagtgctactggactcagttcattattctgtagtttaacagctgagttggctcttagagctgtaacaataagaggccaagccaaatttggtgaattgtccatgttaatttcactaagttgaacaatcttgctatccgcatcaacaacttgctggatttcccagagtgcagatgcatatgtaaaggtgttaccatcacaagtgttcttgtaggtaccataatcagggacaacaaccatgagtttggctgctgtagtcaatggtatgatgttgagtggaacacaaccatcacgcgcattgttgataatgttgttaagtgcatcattatcaagcttcctaagcatagtgaagagcattgtttgcatagcactagttacttttgccctcttgtcctcagatcttgcctgtttgtacatttgggtcatagcctgatctgccatcttttccaacttgcgttgcatggcagcatcacggtcaaactcagatttagccacattcaaagatttctttaactttttgagaacgacttcagaatcaccattagctacagcctgctcataggcctcctgggcagtggcataagcggcatatgatggtaaagaactaaattctgaagcaatagcctgaagagtagcacggttatcgagcatttcctcgcacaacctattaatgtctacagcaccctgcatggatagcaaaacagacaaaagagaaaccatcttctcgaaagcttcagttgtgtcttttgcaagaagaatatcattgtggagttgtacacattgtgcccacaatttagaagatgactctactctaagttgttgaagaaccgagagcagtaccacagatgtgcactttacgtcagacattttagactgtacagtagcaaccttgatacatggtttacctccaatacccaacaacttaatgttaagcttgaaagcatcaatactactcttaggaggcaaaagcccctgggagttcatatacctaaattcttgtgtagagaccaagtagtcataaacaccaagagtaagcctgaagtaacggttgagtaaacagaaaaggccaaagtagcagcagcaacaatagcctaagaaacaataaacaagcatgatacactgtaaggtgttgccagtaataaataacaatgggtaatactcaacacacacaaacactatagctctagctaaaaacatgatagtcgtaacgacaccagaatagttagaggttacagaaataactaaggcccacatggaaatagcttgatctaaagcattaccatagtagactttgtaaacaagtgtaatgacattcatcagtgtccaaacacgtctagcagcatcatcataaacagtgcgagctgtcatgagaataagcaaaactaaagctgaagcatacataacacaatccttaagcctataaccagacaagctagtgtcagccaattcaagccatgtcatgatacgcatcacccagctagcaggcatgtagaccatattaaagtaagcaactgttgcaagagaaggtaacagaaacaagcacaagaatgcgtgcttatgcttaacaagcagcatagcacatgcagcaattgccataataccaagagtaaatggcaagaaagcattctcgtaaacaaagaaaaacagtgaccactgtgtactttgaacaagaatcaatagtgatgtcaagaaagttaaaagcatccaatgatgagtgcccttaacaattttcttgaacttaccttggaaggtaacaccagagcattgtctaacaacatcaaatggtgtaaactcatcttctaaaatagtgctaccaaggatagtacgaccattcataccattctgcagcagctctttcaaagcagcacacatatctaagacggcaattcctgtttgagcagaaagaggtcccaatatgtcaacatgatcttgtgtcaaaggttcatagttgtacttcattgccacaaggttaaagtcattcaaagtagtggtgaatctattaagaaaccacctatcaccattgataacagcagcatacagccatgccaaaacatttaatgttatggttgtgtctgtacctgcagcctgtgcagtttgtctgtcaacaaatggaccatagaatttaccttctaagtcagtaccagcgtgtactcctgttggaagctccatatgatgcatatagcagaaagacacgcaatcataatcaatgttaaaaccaacactaccacatgatccattaaggaaagaacctttaatggtatgattaggtctcatggcacactgataaacaccagatggtgaaccattgtagcatgctagaactgaaaatgtttgaccaggttggatacggacaaatttatacttgggtgtcttagggttagaagtatcaactttaagcctaagcagacaattttgcatagaatggccaataacacgaagttgaacattgccagcctgaacaagaaagctatggttggatttgcgaatgagcagatcttcatagttaggattaagcatgtcttctgctgtgcaaatgacatgtcttggacagtatactgtgtcatccaaccacaatccattaagagttgtagttccacaggttacttgtaccatgcacccttcaactttgcctgacgggaatgccattttcctaaaaccactctgcagaacagcagaagtgattgatgtctgtggtggttggtagagaacatcagcacctgagttgctaaagtcatttagagcctttgctaagtggcagcaagctgcttcacgatagctggtagtatctaaggctccactgaaatacttgtacttgttatatagagcaagatacctgttatactgtgtaagtggcaacagtgtctcgctacgcaattttaggtacatttccttgttgagcaaaaaggtacacaaagcagcctcctcgaaggtactaaatgtaactccattaaacatgactcttttcctaagatagttgttaaagaaccaatggcagtgcttcagagaaatacagaatacatagattgctgttatccaaaaaggcacaataggagaaaacatggcaaaccattgaaggtgagccaagaatgaaacatcattggtgaaatagaatgtcaagtacaagtaaaagactgagtagactcccggcagaaagctgtaagctggtaccagacagagtatagtgaaagacatcaaaaacaaaagtgcattagcagcaacaacatggttgtactcaccaaaaacacgtctgaatttcataaagtagtaggcagcacaagtcaccaatatggcaataataccaccagccactactgaagcagacacatctaaagcacccacaggttgcacaagaggagtaaagatgttagctatgagattcatcgcatcaacaccacagaaaactcctgatagagctctgtaatgctcattattaagaacccatctaccactggtagataggcaaatacctacttctgacctttcgcatgtaccatgtctacagtactcagcatcaaaagttgttactactctaacagaaccctccaggtaagtgttaggaaactgtatgatggaaccatccataagcacataacgagtgtctggacgaagctcactataagaaatagaaccctctagcaaattagtgtcataacaatatggcacaggtttgcccatagcatccttaaaaattgtacactcagcagcaagaacgcaagcagaggtagcaaaatcactatactcaatgagtttggaaggtgtgtagcaaatgttgccaacagcactaaaaacacgaggtagaaaatgcaagaagtcaccattgattgctctcagcacagtacccggtaagccaggcactatgaaaccaatctctcttgtaatgatagcagctactacagggcagcttttgtcatttttgtatgaaccaccacgctggctaaaccatgcgtcaaaaccagcatgtttatttgcaaaacaatcatcagtagaaatgatgtcacgagtgacaccatcctgaatggctttgtaaccaatgatttcatttgtgtaaccatcatggattgacaatgtatgtactggcataacgatataacaaaccaatgcagcaagaacgcacaataatgtggccttaagcataagtttaaaacaagtactaacaatcttaccacccttgagtgagattttagtagttatgacattgacaacctgtctagttgtagcacaagttagtgtaaaaggtatgttgttcttcttggcagcagtacgaatttgtttacgcagctgttcagataaagacatgtagtcttttacattccagatgagtgaaacattgtgactttttgctacttgggcattgatatgccttgcattacagtcaatacatgcgccaagatctctgggcgtcatgttttcaaccttattataggtgagcatgaaattgttacaactgtcacctgtcacttctaagtcagagtgatgtgaaagtttgagacattcaataacatcctttgtgtcaacatcggtatcaacaacaccttgtcgggcagctgacacgaatgtagaaaggacaccatctaaagctacaccctttgctaactcgctgtgagctgtagcaacaagtgccttaagtttttccataggaacactaaaagttgctgaaaaggtgtcgacataagcatcaaacatcttaacggaaacttcagtactatctccaacgtttgatacaagagcttggtcaagcaacagaataggttggcacatcagctgactgtagtacacagaagcagacttagaagcagactcgtcgcatttggacttgccatcaaaaactatgacattaataggcagtgaacctttagtgttgttagctctcaaattgtctaaattgacaaaatgggagagcggatgtctctcataggtcttttgaccagccttgtcaaagtagaggtgaagcgcgccatttttcacagcaacactatcaacaatatacgatgactggtcagtagggttgattggtcttttaaactggagtgacaaatcacgagcaacttcatcactaatgaatgtactaccagtgcaaaatgtgtcacaattgagacaattccaattgtgagtcttgcagaagccacggcctccatttgcatagacatagaaagatctcttcatgccattaacaatagttgtacactcaacgcgtgtggcacgattgcgcttatagcacatcatgcaagtcgaagaggtgcaaccatccatgatatgaacatagctcttccatatgtagtagaaagaagcaaagaagatgtacatcctaaccattgcagaaacgggtgccatttgtacaatactaatgataaaccacatgagccaagaattgctgatgaaatgactagcaaaatagccaaagaacacctgcattatagctgaaagacctaataaataaaagaattttgtgaacaacatatatgccaaaacccactcagcggccagacctaaaattgtcaagtctagcttgtacgatgaaatcgtcacctgaatggtttcaagagctggataagaatcaagggagtctaatccacttaaacaaatgctgcaaggaaaagaaccttcacagaaatccatagtagtaacgttagacgaattaagatacaattctctaacgccattacaataagaaggagcaccaaaattagataagagtacaccaaaagcagcagttacacagattagagaacctaagcaaatacttaacaacaatagccacatagcgattgtgaacaatttagaaaatttgggtgacttcacataattaatgccggcatccaaacataatttagcaacactcttaacactatttttagcaatagttgtaggtagtgaagctctaattctagaattggtacttttagtaaaagtacacaattggaacaataatgtaaacacataaggcatataattgttaaacacacgttgtgctaatctcttagcgcaatttgatgttgtaattgctgcttgtcctaagaatggtttgacataagccaaaattttactccaaggaacactattaattgcagcaataccatgagtggcaattgtttttaaacctaaggctagtgaaagctcattaggtttcttaatggtaatgcttgtgttttccacataagcagccataagatcctcatgacctaactcttgtgttactttaacaccttcatctgatggtttaagtatgacattgcctacaacttcggtagttttcacgtcacactctatgacttccttctgtatggtaggattttccactacttcttcagaggtgggttgttgactttcacaagcaagattgtccattccttgtgtgtcttctactgccagaacttcaaatgaatttgaagtatctactggctttgtactccaaagacaacgtaaacaccaagtgtttggtttgaacgttgtcttggttgtagcctggttaatgtgccaaacaattggcttatgcagtaatttagcacctttcttgaaactcgctgaatagtgtctatagtcaatagccactacatcgccattcaagtctgggaagaatgtgacagatagctctcgtgaagctggctttgtgaagcctgtcatttgatttaaatcatcagcaaattttgtgttagaacatgtgagtttgaaattatcaaaactcgcatttggtaatggttgagttggtacaaggtctataggctgctctgtatagtaagcattatcctttttataatacccatccaattttggttcaatctctgtgtaagtaactccatcgagtttatacgacacaggcttgatggttgtagtgtaagatgtttccttgtagaaaacatcagtcactggtcctttgtactctgacatctttgtaaggtgagctccgtcaatacgatagagggtctccttagcagttatatgagtgtaatgaccacactgatagttaccagtgtactcattcgcacataagaatgtaccttgctgtaatttatactcagcaggtggtgcagacatcataacaaaagaagactcttgttgtactagatattgtgtagcatcacgaccacacacacatggaatggaaacacctgtcttaagattatcataagatagagtacccatatacatcacagcttctacacccgttaaggtagtagttttctgaccacaatgtttacacaccacattaagaactcgctttgcagattccaaattagcatgctgtagaagatgggtcatagtttctctgacatcaccaagctcgccaacagttttattactgtaagcgagtatgagtgcacaaaagttagcagcatcaccagcacgggctctataataagcctcttgaagtgctggtgcattgaatttgacttcaagctgttgaagtgctaataaaacactagacaaataacaattgttatcagcccatttaattgaagttaaaccaccaacttgaggaaatttccatttctttgtgtggtttaaagcagacatgtacctaccaagaaaactctcatcaagagtatggtagtactcgaaagcttcactacgtagtgtgtcatcactaggtagtacaaagaaagtcttaccctcatgatttacatgaggtttaatttttgtaacatcagcaccatccaagtatgttggaccaaactgctgtccatatgtcatagacatatccacaagctgtgtgtggagattagtgttgtccacagttgtgaacacttttatagtcttaacctcccgcagggataagagactctttagtttgtcaagtgaaagaacctcaccgtcaagatgaaactcgacggggctctccagagtgtggtacacaattttgtcaccacgcttaagaaattcaacacctaactctgtacgctgtcctgaataggaccaatctctgtaagagccagccaaagaaactgtttctacaaagtgctcctcagatgtctttgatgacgaagtgaggtatccattatatgtagtaacagcatctggtgatgatactgacactacggcaggagctttaagagaacgcatacagcgcgcagcctcttcaagattaaaaccatgtgtcacataaccaattggcattgtgacaagcggctcatttagagagttcagcttcgtaataatagaagctacaggctctttactagtataaaagaagaatcggacaccatagtcaacgatgccctcttgaattttaattcctttatacttacgttggatggttgccattatggctctaacatccatgcatataggcattaattttcttgtctcttcagcatgagcaagcatttctctcaaattccaggatacagttcctagaatctcttccttagcattaggtgcttctgaaggtagtacataaaatgcagatttgcatttcttaagagcagtcttagcttcctcaagtgtataaccagcacatccttgtccagggtacgtggttatatactcatcaactggcactttcttcaaagctcttgagagcatctcagtagtgccaccagcctttttggagggtattacaacacaagtgatatcaccactagtgataacatcacctaccatgtaaggtgcatccttctcaaggaaagacatatcttcacctctaagcatgttctgagaatcatggtaaagcttaccattgatatcagcaaacaagagtaacttattggtaagaaacttagtttcttccagtgttgtggtaacctcatcaatgcaggccttaatttttggcttcacatcgacaggcttctgtacgacagatttctcctcagttttggaatcttctgtgtttggtggctcctcttgtttaggtgcttccactctaggcttcaggttatcaagataatccatgacaacctgctcataaagagctttgtcattgactgcaatataaacctgtgtacgaaccgtctgcacgcacacttgtaaagactgaagtggtttagcaccaaatatgcctgctgacaacaatggtgcaagtaagatgtcctgtgaattgaaattttcatatgctgccttaagaagctggatgtcctcacctgcatttaggttaggtccaacaacatgcagacacttcttagcaagattatgtccagaaagcaaacaagaccctcctactgtaagagggccatttagcttaatgtaatcatcactctccttttgcatggcaccattggttgccttgttgagtgcacctgctacaccaccaccatgtttcaggtgtatgttagcagcatttacaatcaccataggattagcactttgtgcctccttaacgatgtcaacacatttaatggcaacattgtcagtaagttttaaataaccagtaaactgattaactggttcttcaggtgtaggttctggttctggctcaatctctgattgctcagtagtatcatccagccagtcttcctcttcttcttcctcaactcgaactgtttcagctgaggcaccaaattccagagggagaccttgataatcatcctctgtaccgtactcatgttcacaggtttcatcaatttcttcttcctcacactctgcatcgtcctcttcttcctcatctggagggtaaaaggaacaatacatacgtgatgaaaagttttcttcaccagcatcatcaaataagtagaatgtagctacactccactcatcaagatcaatacccatgttggtaaggagatcagaaactggttgtaaagtcttcacaacagcctctgctacaacacatgcaaactcagtaacttcggtaccggattcaacagtgtagacagagcacttttcattaagcactttgtcaacacgttcatcaagctcaaatgtgattctcacattcttgtaaccttgaacttcccaaacagtatcttctccaaaggttacacctttaattggtgcacccccttttaagcgaaagacattgtttgtagccagtaaaccaggagacaatgcgcagtattgttctttgtccttaatctctaagagcatgaggccatttacacagactggtgtgccgacgatagctccatttgtgaagctatcaacgggcgtctcgagtgcttcgagttcaccgttcttgagaacaacctcctcagaggtaagtactgtgtcatgtgaatcaccttcaagaaaggttacttcttttggtgccttaagaggcatgagtagttgcagctgctccttgccacgtatacactgacggtaaagtcccttgctttgagcgatgaagacttcacctaagttgagtgatcgcaactttgcgccagcgatagtgacttgatcaatgcacatttcgagtgccttgttaacaacatcaatgaagcattttacacaatccttgatgttatctgaagcaacctgtatttgacccttgacgatgtcaaaaacacctgtaatgagaaatttgagaatctcccaagcatccttgagaaattcaactcctgcactaagtttcgcctcaatccattcaaagataggcctgagtttttcaacagtagtgcccaaaagattagacaaccactgagaagtctgttgtacaagaccaccagttacatatgccataataatgacactgttggtgagcaggtctgaagtataaaccatggcgtcgacaagacgtaatgactgttcagaaataccatcaagtatggtgacagctgctctttgcaaatcaggaattgagtggtttgctgcatcaagtgtgcgcgcaaaaattgatctgataacaccagcagcctgtgagggaaaaccacacagtggtgttaaaactgatctctgttgtccaatgttccaagcaccttttacgggctttcccttggtaactttatagttaccgcaggactcaacaatggttttgaaagacttgtaatcaagactctttatagtgtcaataaaggcacttgtagaagcagagaaagatgccaaaatgatggcaacctcttcattcaaatgaaaatcgccaacaatgttaatgttaacacgttcacgactcagtatctcaaggagatcctcattcaaggtctccacattgtcaccagtaatgccagtatggcctgagccaatatcagcactagcacgaggaacccagtaggcacgcttattatagcagccaacataggcaaacacacagcctccaaaacatctagtcctacctcccttgcggagtcgagtttcaatgtttgagtggttgtgataatctgcaacactatgctcaggtccaatctctgggtcttgacaggcaggacatggcattttcactacagcattagtaggtaggtacccacatgtagtaggtccttcaataactaaattttcagtgccacaatgttcacaagtggctttcagaaagtcgcacgtctgccatgaaacttcatcgcaatgattacatttcatcaaggtagacaagtgcatattgttacactcctgtggagatgcaacagggtacacagagcgtatacgccccatgaaaccctcagtctttttcttttcaacacgtggttgaatgactttgacttttgagttaagaggaaacacaaactttgggcattcccctttgaaagtgtcaaatttcttggcactcttaatttcgaagggtgtctggtgctcgtagctcttatcagagcgctcagtgaaccaggcaatttcatgctcatggtcacggcagcagtagacacctctcttcgactcgatgtaatcaagttgttcggaaagagtgcacattgacttgcccgcgcgtgcgagaaaatctttgatgcaatcaagagggtacccatctgggccacagaaattgttgtcgacatagcgagtgactgcacctccattgagctcacgagtgagttcacggagtgcaccactgccatgcttagtgttccagttttgttcataatcttcaatgggatcagtgccaagctcgtcacctaagtcataagactttagatcgatgccatagctatgaccaccggctcccttattaccgttcttacgaagaagaacattgcggtatgcaattggggtttcgcccacatgtggcacgagtactcccagtgttataccgctacgaccgtactgaatgccgtccatttctgcaaccagctcaacgaccttgtggccgtgattggtgcttaaggcatcagaacgtttaatgaacacatagggctgttcaagctggggcagtacgcctttttccagctctactagaccacaagtgccatttttgaggtgttcacgtgcctccgatagggcctcttccacagagtccccgaagccacgcactagcacgtctctaacctgaaggacaggcaaactgagttggacgtgtgttttctcgttgacaccaagaacaaggctctccatcttacctttcggtcacacccggacgaaacctaggtatgctgatgatcgactgcaacacggacgaaaccgtaagcagtctgcagaagagggacgagttactcgtttcttgtcaacgacagtaaaatttattattgtttatactgcgtaggtgcactaggcatgcagccgagcgacagctacacagattttaaagttcgtttagagaacagatctacaagagatcgaggttggttggcttttcctgggtaggtaaaaacctaatat

SEQ ID NO: 1802 - protein, 12 aa, SARS-CoV Virus
FFFFFVILLRSY

SEQ ID NO: 1803 - protein, 53 aa, SARS-CoV Virus
NHMGIALLKLILHIRALPYRQLSLALFTVPSIVLRVASMKMWWLFQVLPNVTH

SEQ ID NO: 1804 - protein, 5 aa, SARS-CoV Virus
LKIAM

SEQ ID NO: 1805 - protein, 21 aa, SARS-CoV Virus
LNLLVLFSYENSFCTRVDYVS

SEQ ID NO: 1806 - protein, 23 aa, SARS-CoV Virus
TELRKRLHSPSALCGHHECLCLS

SEQ ID NO: 1807 - protein, 99 aa, SARS-CoV Virus
ISRSSTHGILKLSGEIIHVSRRKKSHSGLLLLSLRQRLSFISLFLFVLFRLCWWECFVCVNVLVQQYDVVFELWIFVIQFNGSMISQPCSRRCDFHANA

SEQ ID NO: 1808 - protein, 26 aa, SARS-CoV Virus
HSKECRGTWSKLCNLRPMFVISSLSD

SEQ ID NO: 1809 - protein, 66 aa, SARS-CoV Virus
VLVPEISLGLFWTTSPKCLSDVVLFCGSTFLARLFRCLSSRFLSDSLALLLLAFTRNFALKLVQSV

SEQ ID NO: 1810 - protein, 23 aa, SARS-CoV Virus
REGSFTTSASHSSRRISPTAARS

SEQ ID NO: 1811 - protein, 5 aa, SARS-CoV Virus
ITATT

SEQ ID NO: 1812 - protein, 27 aa, SARS-CoV Virus
GARRGLTAASASLCVEAFWQCCSLRKL

SEQ ID NO: 1813 - protein, 38 aa, SARS-CoV Virus
HGGSIVIRIAGANVVFGCIQGSLSCNPYDAFFVSAVGK

SEQ ID NO: 1814 - protein, 6 aa, SARS-CoV Virus
SFWASS

SEQ ID NO: 1815 - protein, 67 aa, SARS-CoV Virus
VIEVPSGAELFHFAVTTTNSSGSSSVVANLVIWTTIGVDWNALASRESKFLLAMLSESCEPRRSIIG

SEQ ID NO: 1816 - protein, 21 aa, SARS-CoV Virus
TLGSALFWPCPIASSILVIVS

SEQ ID NO: 1817 - protein, 15 aa, SARS-CoV Virus
ICGSTKCNAGGTTLV

SEQ ID NO: 1818 - protein, 20 aa, SARS-CoV Virus
LGSIIRHFNLFVYLKQQVRL

SEQ ID NO: 1819 - protein, 13 aa, SARS-CoV Virus
MQQFGDLHEGTNT

SEQ ID NO: 1820 - protein, 9 aa, SARS-CoV Virus
AHHQLDLDS

SEQ ID NO: 1821 - protein, 6 aa, SARS-CoV Virus
VCMFEP

SEQ ID NO: 1822 - protein, 23 aa, SARS-CoV Virus
CAIYEKVKPFLEHKAKQCYKYYP

SEQ ID NO: 1823 - protein, 10 aa, SARS-CoV Virus
CCTLQGSSST

SEQ ID NO: 1824 - protein, 30 aa, SARS-CoV Virus
GLLDAQRCTTVHMQLHREIQVKTMRSFMFV

SEQ ID NO: 1825 - protein, 34 aa, SARS-CoV Virus
TLVQGSSRSWISSENQNIISIIKTRNSRKAKKHK

SEQ ID NO: 1826 - protein, 13 aa, SARS-CoV Virus
KSIKVSSFILSFS

SEQ ID NO: 1827 - protein, 11 aa, SARS-CoV Virus
SKVLKILEQQQ

SEQ ID NO: 1828 - protein, 14 aa, SARS-CoV Virus
EKVASRALVEPPLV

SEQ ID NO: 1829 - protein, 27 aa, SARS-CoV Virus
KVLVKLILHAADRYVEYRQHKQKQSVC

SEQ ID NO: 1830 - protein, 34 aa, SARS-CoV Virus
CKLVQIYCQQEGEMVNCPRMFLMGKVLLVVQSYL

SEQ ID NO: 1831 - protein, 11 aa, SARS-CoV Virus
HTPDSDIARKM

SEQ ID NO: 1832 - protein, 8 aa, SARS-CoV Virus
IQSMSGRE

SEQ ID NO: 1833 - protein, 7 aa, SARS-CoV Virus
FSCSFYG

SEQ ID NO: 1834 - protein, 12 aa, SARS-CoV Virus
SNSIGSSSSNSE

SEQ ID NO: 1835 - protein, 45 aa, SARS-CoV Virus
FFLVRGLNNCLTIELIITSRFQIAILKVLIMIINISAIVTWKSTR

SEQ ID NO: 1836 - protein, 8 aa, SARS-CoV Virus
NICCHLLY

SEQ ID NO: 1837 - protein, 13 aa, SARS-CoV Virus
QSNIVVATGVVCI

SEQ ID NO: 1838 - protein, 14 aa, SARS-CoV Virus
FIVSNTVAVVCSKT

SEQ ID NO: 1839 - protein, 9 aa, SARS-CoV Virus
ISAYTLRRS

SEQ ID NO: 1840 - protein, 7 aa, SARS-CoV Virus
FVIRKRS

SEQ ID NO: 1841 - protein, 16 aa, SARS-CoV Virus
CSHSDLFWQVLNVTAP

SEQ ID NO: 1842 - protein, 44 aa, SARS-CoV Virus
GVSGHSQVTTNDHSTNDKFTFHERSGHNCPPERHIEKNVCFWVE

SEQ ID NO: 1843 - protein, 72 aa, SARS-CoV Virus
AGTSKQPEGSNEVAKPHQAYNTSHCNRNPASHPINSVDNSKHKTSKCYWPQEPEENKLYYVQKPVPIRIGKL

SEQ ID NO: 1844 - protein, 4 aa, SARS-CoV Virus
HNPG

SEQ ID NO: 1845 - protein, 4 aa, SARS-CoV Virus
ETYY

SEQ ID NO: 1846 - protein, 24 aa, SARS-CoV Virus
VPLFQELFKLLNGNSTVVCHDKQC

SEQ ID NO: 1847 - protein, 9 aa, SARS-CoV Virus
SSKQNNNNS

SEQ ID NO: 1848 - protein, 17 aa, SARS-CoV Virus
TRRSGTPSEEFRFLTRE

SEQ ID NO: 1849 - protein, 76 aa, SARS-CoV Virus
TVGFTKLTLTILQQYAHNRSAVRMASVTSKNTTKARKRSTLLTINVPVSSETNEYISSYSLSCAYKGTLVVVVGSS

SEQ ID NO: 1850 - protein, 50 aa, SARS-CoV Virus
IGSIAGLATPEEPSIVCICTFGGSLTSLLKMKNVAFSIPVSVVICVDSSW

SEQ ID NO: 1851 - protein, 4 aa, SARS-CoV Virus
TSVK

SEQ ID NO: 1852 - protein, 5 aa, SARS-CoV Virus
PCTTT

SEQ ID NO: 1853 - protein, 10 aa, SARS-CoV Virus
SLTPECLSSE

SEQ ID NO: 1854 - protein, 4 aa, SARS-CoV Virus
PPIW

SEQ ID NO: 1855 - protein, 27 aa, SARS-CoV Virus
SSLSFGVEMPSPSVTTIVSVTLLYGIQ

SEQ ID NO: 1856 - protein, 8 aa, SARS-CoV Virus
LCVCQQTK

SEQ ID NO: 1857 - protein, 31 aa, SARS-CoV Virus
SNGFLDLHFQQSQHLIIILHALMHCRKYIKA

SEQ ID NO: 1858 - protein, 17 aa, SARS-CoV Virus
RYKNCASLPAATSKRCE

SEQ ID NO: 1859 - protein, 16 aa, SARS-CoV Virus
MVTNSSSKLQMNWKPL

SEQ ID NO: 1860 - protein, 16 aa, SARS-CoV Virus
RASCHLLLSAIILVAL

SEQ ID NO: 1861 - protein, 26 aa, SARS-CoV Virus
KTARNATPITSHPKGSEACSGIVAVA

SEQ ID NO: 1862 - protein, 37 aa, SARS-CoV Virus
TVLAGEALSIFTGCAVIDPRVKNLINKSISSFMCNVI

SEQ ID NO: 1863 - protein, 20 aa, SARS-CoV Virus
ELAQSHPHQTCSKNHKSMHP

SEQ ID NO: 1864 - protein, 5 aa, SARS-CoV Virus
GNCNN

SEQ ID NO: 1865 - protein, 7 aa, SARS-CoV Virus
SCNKARL

SEQ ID NO: 1866 - protein, 7 aa, SARS-CoV Virus
RWQLVQQ

SEQ ID NO: 1867 - protein, 9 aa, SARS-CoV Virus
SRAKHTKAI

SEQ ID NO: 1868 - protein, 12 aa, SARS-CoV Virus
YIAHIFPILEGQ

SEQ ID NO: 1869 - protein, 6 aa, SARS-CoV Virus
VIHLNF

SEQ ID NO: 1870 - protein, 8 aa, SARS-CoV Virus
GGQFLFEC

SEQ ID NO: 1871 - protein, 4 aa, SARS-CoV Virus
RQKR

SEQ ID NO: 1872 - protein, 15 aa, SARS-CoV Virus
CLKCRQDQHLVMYDF

SEQ ID NO: 1873 - protein, 7 aa, SARS-CoV Virus
STCPALL

SEQ ID NO: 1874 - protein, 14 aa, SARS-CoV Virus
MSQAQVAEDHKLCC

SEQ ID NO: 1875 - protein, 12 aa, SARS-CoV Virus
RHHNFLRQMYCL

SEQ ID NO: 1876 - protein, 10 aa, SARS-CoV Virus
LFVEKRSSSV

SEQ ID NO: 1877 - protein, 5 aa, SARS-CoV Virus
TKKCH

SEQ ID NO: 1878 - protein, 21 aa, SARS-CoV Virus
TQKHLHEGSMLCLHDKLLALW

SEQ ID NO: 1879 - protein, 9 aa, SARS-CoV Virus
SSSPGMAHT

SEQ ID NO: 1880 - protein, 15 aa, SARS-CoV Virus
HVGRQHHAGLLVGRT

SEQ ID NO: 1881 - protein, 21 aa, SARS-CoV Virus
GGSPFHKSQLFLIVQEHTQTF

SEQ ID NO: 1882 - protein, 4 aa, SARS-CoV Virus
FQQP

SEQ ID NO: 1883 - protein, 15 aa, SARS-CoV Virus
LVVVLHRFEGFEVCL

SEQ ID NO: 1884 - protein, 28 aa, SARS-CoV Virus
LTCQFVPPPRLYQVAKGYHLAHLKLHQN

SEQ ID NO: 1885 - protein, 10 aa, SARS-CoV Virus
QVCLMLEHSG

SEQ ID NO: 1886 - protein, 13 aa, SARS-CoV Virus
QRLAACPMQLMLL

SEQ ID NO: 1887 - protein, 6 aa, SARS-CoV Virus
VILEFD

SEQ ID NO: 1888 - protein, 15 aa, SARS-CoV Virus
IGWRFVFGSHREHFG

SEQ ID NO: 1889 - protein, 4 aa, SARS-CoV Virus
LQCH

SEQ ID NO: 1890 - protein, 6 aa, SARS-CoV Virus
TYMPFA

SEQ ID NO: 1891 - protein, 20 aa, SARS-CoV Virus
QKVFEEQRQHQMSIQQWQYH

SEQ ID NO: 1892 - protein, 12 aa, SARS-CoV Virus
LEQQCRQQSYHQ

SEQ ID NO: 1893 - protein, 6 aa, SARS-CoV Virus
AEVATL

SEQ ID NO: 1894 - protein, 5 aa, SARS-CoV Virus
TSAHK

SEQ ID NO: 1895 - protein, 10 aa, SARS-CoV Virus
YHLGIRHIAS

SEQ ID NO: 1896 - protein, 9 aa, SARS-CoV Virus
SQHQRVSPY

SEQ ID NO: 1897 - protein, 5 aa, SARS-CoV Virus
RASPQ

SEQ ID NO: 1898 - protein, 12 aa, SARS-CoV Virus
LALEGQVIFVKN

SEQ ID NO: 1899 - protein, 14 aa, SARS-CoV Virus
NHQNISKLGFCTFV

SEQ ID NO: 1900 - protein, 34 aa, SARS-CoV Virus
LERTLHVCCDPVQQQYLRVHDLVVCKSYHIGEAN

SEQ ID NO: 1901 - protein, 13 aa, SARS-CoV Virus
NLRRCTYYNLRRF

SEQ ID NO: 1902 - protein, 6 aa, SARS-CoV Virus
KQALLL

SEQ ID NO: 1903 - protein, 4 aa, SARS-CoV Virus
QWCY

SEQ ID NO: 1904 - protein, 11 aa, SARS-CoV Virus
SKQLNYQHLKT

SEQ ID NO: 1905 - protein, 4 aa, SARS-CoV Virus
YKPQ

SEQ ID NO: 1906 - protein, 10 aa, SARS-CoV Virus
YYVIKKLYGN

SEQ ID NO: 1907 - protein, 6 aa, SARS-CoV Virus
HKCQLQ

SEQ ID NO: 1908 - protein, 14 aa, SARS-CoV Virus
ECRTHKKCRHAQLL

SEQ ID NO: 1909 - protein, 12 aa, SARS-CoV Virus
DSLLESGIHCFQ

SEQ ID NO: 1910 - protein, 7 aa, SARS-CoV Virus
NICAKLV

SEQ ID NO: 1911 - protein, 7 aa, SARS-CoV Virus
VDLHELL

SEQ ID NO: 1912 - protein, 5 aa, SARS-CoV Virus
KHQCS

SEQ ID NO: 1913 - protein, 16 aa, SARS-CoV Virus
HLDIEQQLQMKHLFQV

SEQ ID NO: 1914 - protein, 18 aa, SARS-CoV Virus
LHLHPQKSKVKCLIFQMF

SEQ ID NO: 1915 - protein, 6 aa, SARS-CoV Virus
DLERNQ

SEQ ID NO: 1916 - protein, 25 aa, SARS-CoV Virus
NQKHHGQIVEMVEISLKKELTHQYQ

SEQ ID NO: 1917 - protein, 4 aa, SARS-CoV Virus
HTGS

SEQ ID NO: 1918 - protein, 32 aa, SARS-CoV Virus
GQWIILVHKPWPVHLKVQKKVLQLCKVGSQCQ

SEQ ID NO: 1919 - protein, 13 aa, SARS-CoV Virus
WCKNHNHLMANNN

SEQ ID NO: 1920 - protein, 15 aa, SARS-CoV Virus
EQVGCKVCHQGRKAH

SEQ ID NO: 1921 - protein, 7 aa, SARS-CoV Virus
ICLSQRA

SEQ ID NO: 1922 - protein, 4 aa, SARS-CoV Virus
ACHV

SEQ ID NO: 1923 - protein, 12 aa, SARS-CoV Virus
DTYIYNYNYQLK

SEQ ID NO: 1924 - protein, 4 aa, SARS-CoV Virus
HQCS

SEQ ID NO: 1925 - protein, 8 aa, SARS-CoV Virus
YSKQGHNP

SEQ ID NO: 1926 - protein, 11 aa, SARS-CoV Virus
NHLAIYNYNQQ

SEQ ID NO: 1927 - protein, 14 aa, SARS-CoV Virus
HQFVLALFVLHHLP

SEQ ID NO: 1928 - protein, 16 aa, SARS-CoV Virus
LQKNLHRHWRSKDHST

SEQ ID NO: 1929 - protein, 7 aa, SARS-CoV Virus
WQKRHST

SEQ ID NO: 1930 - protein, 17 aa, SARS-CoV Virus
RLKKMLSCRAQSNQQHN

SEQ ID NO: 1931 - protein, 13 aa, SARS-CoV Virus
KFFFSPMHRQKGI

SEQ ID NO: 1932 - protein, 9 aa, SARS-CoV Virus
KPLQKDTSL

SEQ ID NO: 1933 - protein, 11 aa, SARS-CoV Virus
GISQHLLREQP

SEQ ID NO: 1934 - protein, 12 aa, SARS-CoV Virus
RSGKFLCQSQSS

SEQ ID NO: 1935 - protein, 13 aa, SARS-CoV Virus
VQQVDFENNQQHL

SEQ ID NO: 1936 - protein, 7 aa, SARS-CoV Virus
LYHFHHT

SEQ ID NO: 1937 - protein, 24 aa, SARS-CoV Virus
LALNSQQNRLQLTCPKCLEQVKRL

SEQ ID NO: 1938 - protein, 5 aa, SARS-CoV Virus
YQEAT

SEQ ID NO: 1939 - protein, 4 aa, SARS-CoV Virus
VSKC

SEQ ID NO: 1940 - protein, 10 aa, SARS-CoV Virus
NQKVDHELHL

SEQ ID NO: 1941 - protein, 14 aa, SARS-CoV Virus
VDSPYKHRETHLYF

SEQ ID NO: 1942 - protein, 7 aa, SARS-CoV Virus
TQTLVSV

SEQ ID NO: 1943 - protein, 21 aa, SARS-CoV Virus
NYLTFLKHQAKRHQICTRKCN

SEQ ID NO: 1944 - protein, 6 aa, SARS-CoV Virus
MHYRIS

SEQ ID NO: 1945 - protein, 8 aa, SARS-CoV Virus
YVSVYPWV

SEQ ID NO: 1946 - protein, 16 aa, SARS-CoV Virus
KQQRKGCHTIQSYMLV

SEQ ID NO: 1947 - protein, 9 aa, SARS-CoV Virus
SPTVTCCSW

SEQ ID NO: 1948 - protein, 21 aa, SARS-CoV Virus
NQKPNHGQHLISLWQQNKYHP

SEQ ID NO: 1949 - protein, 7 aa, SARS-CoV Virus
QGCQTYD

SEQ ID NO: 1950 - protein, 4 aa, SARS-CoV Virus
YETL

SEQ ID NO: 1951 - protein, 16 aa, SARS-CoV Virus
NKMEEINPELNKECLI

SEQ ID NO: 1952 - protein, 10 aa, SARS-CoV Virus
KFHQDSKPPS

SEQ ID NO: 1953 - protein, 7 aa, SARS-CoV Virus
MKYVECN

SEQ ID NO: 1954 - protein, 16 aa, SARS-CoV Virus
ELEHHQKWCTGQGHYH

SEQ ID NO: 1955 - protein, 5 aa, SARS-CoV Virus
EIIRK

SEQ ID NO: 1956 - protein, 6 aa, SARS-CoV Virus
TCSFSC

SEQ ID NO: 1957 - protein, 13 aa, SARS-CoV Virus
QEYHLKPQLCCFL

SEQ ID NO: 1958 - protein, 12 aa, SARS-CoV Virus
AYLFPEENKSYH

SEQ ID NO: 1959 - protein, 4 aa, SARS-CoV Virus
FDSP

SEQ ID NO: 1960 - protein, 9 aa, SARS-CoV Virus
ETLQQFLLI

SEQ ID NO: 1961 - protein, 15 aa, SARS-CoV Virus
EEICSCQRVNRKTTG

SEQ ID NO: 1962 - protein, 9 aa, SARS-CoV Virus
DLCSSRKCS

SEQ ID NO: 1963 - protein, 16 aa, SARS-CoV Virus
HAWYSHQFVPSACQDS

SEQ ID NO: 1964 - protein, 14 aa, SARS-CoV Virus
PQLKMLPMMMHLHL

SEQ ID NO: 1965 - protein, 10 aa, SARS-CoV Virus
QKLSTMRNGP

SEQ ID NO: 1966 - protein, 16 aa, SARS-CoV Virus
ACKGQHSKNALLSLQL

SEQ ID NO: 1967 - protein, 9 aa, SARS-CoV Virus
NHPGLVFAL

SEQ ID NO: 1968 - protein, 5 aa, SARS-CoV Virus
IHTDK

SEQ ID NO: 1969 - protein, 4 aa, SARS-CoV Virus
KTLL

SEQ ID NO: 1970 - protein, 10 aa, SARS-CoV Virus
SHSLLSHVWS

SEQ ID NO: 1971 - protein, 5 aa, SARS-CoV Virus
GHTYR

SEQ ID NO: 1972 - protein, 4 aa, SARS-CoV Virus
GPIY

SEQ ID NO: 1973 - protein, 11 aa, SARS-CoV Virus
PYVLLHSLQLK

SEQ ID NO: 1974 - protein, 8 aa, SARS-CoV Virus
NLRRRRSH

SEQ ID NO: 1975 - protein, 14 aa, SARS-CoV Virus
DLNRQVVCQLATIV

SEQ ID NO: 1976 - protein, 17 aa, SARS-CoV Virus
AQLYLVQLLYQSQHQSE

SEQ ID NO: 1977 - protein, 9 aa, SARS-CoV Virus
LSCCRVQLK

SEQ ID NO: 1978 - protein, 21 aa, SARS-CoV Virus
VYLSIDTVEYTLRHSSLFLLV

SEQ ID NO: 1979 - protein, 22 aa, SARS-CoV Virus
QHFHHNSEGHTFQEAFFASCTS

SEQ ID NO: 1980 - protein, 28 aa, SARS-CoV Virus
ASQHLVATLDLLVVLGRRFQHVHPYTKA

SEQ ID NO: 1981 - protein, 8 aa, SARS-CoV Virus
MKFQHSQL

SEQ ID NO: 1982 - protein, 38 aa, SARS-CoV Virus
PLLKSLTNLVTLLSRQSHQVKDQSQNTHILMNLFAHLL

SEQ ID NO: 1983 - protein, 8 aa, SARS-CoV Virus
SNFSLCCP

SEQ ID NO: 1984 - protein, 4 aa, SARS-CoV Virus
NPLI

SEQ ID NO: 1985 - protein, 22 aa, SARS-CoV Virus
VVNLVSAWLSLSLNEDRQVVHD

SEQ ID NO: 1986 - protein, 18 aa, SARS-CoV Virus
NLHKRCVRRHSPRAYIAV

SEQ ID NO: 1987 - protein, 13 aa, SARS-CoV Virus
RARESQFPFVIWA

SEQ ID NO: 1988 - protein, 8 aa, SARS-CoV Virus
NPLSLCSE

SEQ ID NO: 1989 - protein, 8 aa, SARS-CoV Virus
SRFQATVE

SEQ ID NO: 1990 - protein, 5 aa, SARS-CoV Virus
CRLLS

SEQ ID NO: 1991 - protein, 10 aa, SARS-CoV Virus
TVFLLILQLM

SEQ ID NO: 1992 - protein, 11 aa, SARS-CoV Virus
LVLVPLKVLDL

SEQ ID NO: 1993 - protein, 13 aa, SARS-CoV Virus
LNLLLLKHHYGRF

SEQ ID NO: 1994 - protein, 14 aa, SARS-CoV Virus
KGLPVLPLYHQTRQ

SEQ ID NO: 1995 - protein, 7 aa, SARS-CoV Virus
VKNKHSQ

SEQ ID NO: 1996 - protein, 13 aa, SARS-CoV Virus
VSWQCQSLCRHLL

SEQ ID NO: 1997 - protein, 15 aa, SARS-CoV Virus
IHVLGLLFCSPRLQY

SEQ ID NO: 1998 - protein, 8 aa, SARS-CoV Virus
QRYQHPNY

SEQ ID NO: 1999 - protein, 5 aa, SARS-CoV Virus
SLALV

SEQ ID NO: 2000 - protein, 7 aa, SARS-CoV Virus
PKAQMQH

SEQ ID NO: 2001 - protein, 23 aa, SARS-CoV Virus
QEVLSYFQRSPHQYHLPLCKQHY

SEQ ID NO: 2002 - protein, 15 aa, SARS-CoV Virus
WKQVLRRRVHQSVLY

SEQ ID NO: 2003 - protein, 13 aa, SARS-CoV Virus
QHYKPHFLNSVTW

SEQ ID NO: 2004 - protein, 16 aa, SARS-CoV Virus
MYSTGYKYQIVCKSIG

SEQ ID NO: 2005 - protein, 31 aa, SARS-CoV Virus
IQQKSSYYMHPSTVGTHLHGVCKQHHLNCIV

SEQ ID NO: 2006 - protein, 30 aa, SARS-CoV Virus
VEHNQYPTLLVCHETHKDYQNSKRKAIALN

SEQ ID NO: 2007 - protein, 58 aa, SARS-CoV Virus
MHFYRKLECGMHAYSHTNYHHHSLVSSSLTRLLCQTYTQLHWLGNDQRYNSKTNKHHQ

SEQ ID NO: 2008 - protein, 5 aa, SARS-CoV Virus
IYRDV

SEQ ID NO: 2009 - protein, 32 aa, SARS-CoV Virus
HKNRRVPLFCKLCHYMAEHRRTSILLQPEAHT

SEQ ID NO: 2010 - protein, 31 aa, SARS-CoV Virus
PLDFQCHEELETYQQAMQTSQPCVVLFCKQN

SEQ ID NO: 2011 - protein, 6 aa, SARS-CoV Virus
PSVHLL

SEQ ID NO: 2012 - protein, 9 aa, SARS-CoV Virus
GIQQTNQRA

SEQ ID NO: 2013 - protein, 9 aa, SARS-CoV Virus
QSTHGLLNI

SEQ ID NO: 2014 - protein, 20 aa, SARS-CoV Virus
PHVHFHVPGNVGHGYSEGYP

SEQ ID NO: 2015 - protein, 8 aa, SARS-CoV Virus
SPTAEHQS

SEQ ID NO: 2016 - protein, 21 aa, SARS-CoV Virus
MGYRHSQNPQNDSSRHKYLMK

SEQ ID NO: 2017 - protein, 18 aa, SARS-CoV Virus
KSKLHVCHTDNTFFQVQS

SEQ ID NO: 2018 - protein, 6 aa, SARS-CoV Virus
QSTSLM

SEQ ID NO: 2019 - protein, 21 aa, SARS-CoV Virus
AQSHAPKGRTRLCLTILSVYH

SEQ ID NO: 2020 - protein, 5 aa, SARS-CoV Virus
AFVLS

SEQ ID NO: 2021 - protein, 11 aa, SARS-CoV Virus
YALHSRASLYT

SEQ ID NO: 2022 - protein, 9 aa, SARS-CoV Virus
TGHLVEVLH

SEQ ID NO: 2023 - protein, 17 aa, SARS-CoV Virus
ILCYFQCQHNQSVQLLS

SEQ ID NO: 2024 - protein, 8 aa, SARS-CoV Virus
KILAGEVG

SEQ ID NO: 2025 - protein, 5 aa, SARS-CoV Virus
YPQHL

SEQ ID NO: 2026 - protein, 17 aa, SARS-CoV Virus
LHDSPLHQSQSTHERDE

SEQ ID NO: 2027 - protein, 4 aa, SARS-CoV Virus
LLRG

SEQ ID NO: 2028 - protein, 5 aa, SARS-CoV Virus
LGNSF

SEQ ID NO: 2029 - protein, 20 aa, SARS-CoV Virus
VYGRSCPLVCLVCQHIILQS

SEQ ID NO: 2030 - protein, 5 aa, SARS-CoV Virus
ILYQR

SEQ ID NO: 2031 - protein, 4 aa, SARS-CoV Virus
DEDQ

SEQ ID NO: 2032 - protein, 5 aa, SARS-CoV Virus
SYYSP

SEQ ID NO: 2033 - protein, 10 aa, SARS-CoV Virus
KVQLHFLLVM

SEQ ID NO: 2034 - protein, 10 aa, SARS-CoV Virus
PHCDVVFLDL

SEQ ID NO: 2035 - protein, 21 aa, SARS-CoV Virus
IAVCHKDLYQTLCTKCQFLPL

SEQ ID NO: 2036 - protein, 8 aa, SARS-CoV Virus
HYKSVLFQ

SEQ ID NO: 2037 - protein, 14 aa, SARS-CoV Virus
HSHIQNPVMNQQSA

SEQ ID NO: 2038 - protein, 17 aa, SARS-CoV Virus
AILRFLKLQRSVNYKVR

SEQ ID NO: 2039 - protein, 10 aa, SARS-CoV Virus
KQLFSKQDCV

SEQ ID NO: 2040 - protein, 11 aa, SARS-CoV Virus
EILLQRLFEVC

SEQ ID NO: 2041 - protein, 7 aa, SARS-CoV Virus
LQMKHHV

SEQ ID NO: 2042 - protein, 6 aa, SARS-CoV Virus
HLCRTF

SEQ ID NO: 2043 - protein, 43 aa, SARS-CoV Virus
SIELTYPCVLLAYCHKLKHSQCQQFQQDNGDKFQGTCLDLLFS

SEQ ID NO: 2044 - protein, 5 aa, SARS-CoV Virus
VCTLN

SEQ ID NO: 2045 - protein, 8 aa, SARS-CoV Virus
NILVLVCL

SEQ ID NO: 2046 - protein, 23 aa, SARS-CoV Virus
SAMCGGLVIEQDRQYRRSVLHEV

SEQ ID NO: 2047 - protein, 6 aa, SARS-CoV Virus
QHSSHN

SEQ ID NO: 2048 - protein, 30 aa, SARS-CoV Virus
RFHQRLQCQQLFLAMHLQCRKHTVLVLNSL

SEQ ID NO: 2049 - protein, 12 aa, SARS-CoV Virus
IYQNTLRAHAQV

SEQ ID NO: 2050 - protein, 54 aa, SARS-CoV Virus
FYYIYLWANILMPFHIGHQQLHESMPYTLCEQMGNREQVRWQNDSYQYQVVLGV

SEQ ID NO: 2051 - protein, 14 aa, SARS-CoV Virus
STFACRPFDNLQHC

SEQ ID NO: 2052 - protein, 6 aa, SARS-CoV Virus
KTHLRC

SEQ ID NO: 2053 - protein, 6 aa, SARS-CoV Virus
VLGTSQ

SEQ ID NO: 2054 - protein, 10 aa, SARS-CoV Virus
FSHSALVALE

SEQ ID NO: 2055 - protein, 20 aa, SARS-CoV Virus
VALQCEMSTQSNHQHSTCMS

SEQ ID NO: 2056 - protein, 25 aa, SARS-CoV Virus
YLCTQQHHHSHLFQRCTLQSVLYYF

SEQ ID NO: 2057 - protein, 5 aa, SARS-CoV Virus
LHGNQ

SEQ ID NO: 2058 - protein, 9 aa, SARS-CoV Virus
RHSFCSMVV

SEQ ID NO: 2059 - protein, 26 aa, SARS-CoV Virus
VFQPPMKDAILCQRVLRVQWQYHMTA

SEQ ID NO: 2060 - protein, 6 aa, SARS-CoV Virus
MFPQWL

SEQ ID NO: 2061 - protein, 7 aa, SARS-CoV Virus
AFLLRKA

SEQ ID NO: 2062 - protein, 14 aa, SARS-CoV Virus
VSQYKCWQVCNRQH

SEQ ID NO: 2063 - protein, 8 aa, SARS-CoV Virus
SNHMLLSH

SEQ ID NO: 2064 - protein, 17 aa, SARS-CoV Virus
HCHCLHMCFCINQKPDH

SEQ ID NO: 2065 - protein, 5 aa, SARS-CoV Virus
HIMEN

SEQ ID NO: 2066 - protein, 21 aa, SARS-CoV Virus
WEAYVTCNNSSYLLDTVVSHQ

SEQ ID NO: 2067 - protein, 11 aa, SARS-CoV Virus
HHNLGHCKHRD

SEQ ID NO: 2068 - protein, 10 aa, SARS-CoV Virus
QTTLICVMLK

SEQ ID NO: 2069 - protein, 13 aa, SARS-CoV Virus
HGHSSTCNIGMVS

SEQ ID NO: 2070 - protein, 28 aa, SARS-CoV Virus
YRHRNEVKSVNCTIHKHLQPARLYVVCT

SEQ ID NO: 2071 - protein, 14 aa, SARS-CoV Virus
PHKTQVPSTVRCYH

SEQ ID NO: 2072 - protein, 12 aa, SARS-CoV Virus
LALRNTCPTCGQ

SEQ ID NO: 2073 - protein, 6 aa, SARS-CoV Virus
AHHVTF

SEQ ID NO: 2074 - protein, 14 aa, SARS-CoV Virus
CIVNTSERHQHTPD

SEQ ID NO: 2075 - protein, 5 aa, SARS-CoV Virus
VGKHQ

SEQ ID NO: 2076 - protein, 8 aa, SARS-CoV Virus
PVTRTFQS

SEQ ID NO: 2077 - protein, 5 aa, SARS-CoV Virus
VYHLF

SEQ ID NO: 2078 - protein, 27 aa, SARS-CoV Virus
QYHRQNSLRLIFLMDLGKAGTRNHLLV

SEQ ID NO: 2079 - protein, 13 aa, SARS-CoV Virus
LALYAVSKIREVL

SEQ ID NO: 2080 - protein, 11 aa, SARS-CoV Virus
GQSQSNILPQT

SEQ ID NO: 2081 - protein, 10 aa, SARS-CoV Virus
THYFDNKELP

SEQ ID NO: 2082 - protein, 76 aa, SARS-CoV Virus
LLNLEPHSYCYSTQRHHQKESSWRNVYAGKRKTHPRIHDQHPYFYRDTHRACVVDCGHTCQLSYYHQLKEVHLHWL

SEQ ID NO: 2083 - protein, 5 aa, SARS-CoV Virus
QLDKC

SEQ ID NO: 2084 - protein, 4 aa, SARS-CoV Virus
HKQL

SEQ ID NO: 2085 - protein, 9 aa, SARS-CoV Virus
HHRMMFHLV

SEQ ID NO: 2086 - protein, 7 aa, SARS-CoV Virus
HIVSRHT

SEQ ID NO: 2087 - protein, 10 aa, SARS-CoV Virus
PSHLILAHTR

SEQ ID NO: 2088 - protein, 25 aa, SARS-CoV Virus
LTCRNGVISYSKCYVCEQEQERPLS

SEQ ID NO: 2089 - protein, 12 aa, SARS-CoV Virus
AWLCHILDNPNP

SEQ ID NO: 2090 - protein, 28 aa, SARS-CoV Virus
GVEFLHHCKQFLTYYASHRKTCLFQLPQ

SEQ ID NO: 2091 - protein, 16 aa, SARS-CoV Virus
WRLLTSIISDETVYLS

SEQ ID NO: 2092 - protein, 12 aa, SARS-CoV Virus
RHQLRCELYSLH

SEQ ID NO: 2093 - protein, 5 aa, SARS-CoV Virus
DSFEL

SEQ ID NO: 2094 - protein, 18 aa, SARS-CoV Virus
YTRKVHLDPHNSLSHNKV

SEQ ID NO: 2095 - protein, 5 aa, SARS-CoV Virus
PYPIY

SEQ ID NO: 2096 - protein, 10 aa, SARS-CoV Virus
MGNQLIYPDC

SEQ ID NO: 2097 - protein, 6 aa, SARS-CoV Virus
RLLGWH

SEQ ID NO: 2098 - protein, 21 aa, SARS-CoV Virus
YSHHRNNQSIYQQLQLRIGVV

SEQ ID NO: 2099 - protein, 15 aa, SARS-CoV Virus
YHTLLADYNDNSHNH

SEQ ID NO: 2100 - protein, 19 aa, SARS-CoV Virus
QRCHPEQRRSVLVQQNFLP

SEQ ID NO: 2101 - protein, 9 aa, SARS-CoV Virus
TQQSHKSLY

SEQ ID NO: 2102 - protein, 4 aa, SARS-CoV Virus
NYRV

SEQ ID NO: 2103 - protein, 16 aa, SARS-CoV Virus
QFEKQHCLLVQLLKSM

SEQ ID NO: 2104 - protein, 13 aa, SARS-CoV Virus
CVYLAINCQKLHA

SEQ ID NO: 2105 - protein, 10 aa, SARS-CoV Virus
LDQQHTLKVP

SEQ ID NO: 2106 - protein, 42 aa, SARS-CoV Virus
DASYVSLHPDYVRLLTHENGIQLKQQKEHHLQIFFLLVVQNL

SEQ ID NO: 2107 - protein, 4 aa, SARS-CoV Virus
VETQ

SEQ ID NO: 2108 - protein, 4 aa, SARS-CoV Virus
KITH

SEQ ID NO: 2109 - protein, 13 aa, SARS-CoV Virus
SLHNEGYTYHPNS

SEQ ID NO: 2110 - protein, 11 aa, SARS-CoV Virus
YNWDGMSGPNI

SEQ ID NO: 2111 - protein, 11 aa, SARS-CoV Virus
NNGRRDKVSLP

SEQ ID NO: 2112 - protein, 8 aa, SARS-CoV Virus
NHISANPT

SEQ ID NO: 2113 - protein, 16 aa, SARS-CoV Virus
VVLRDQHPYGTQQPMP

SEQ ID NO: 2114 - protein, 12 aa, SARS-CoV Virus
GWASAMSNMNPQ

SEQ ID NO: 2115 - protein, 19 aa, SARS-CoV Virus
ELRSLVLLVRNHRNRTSSH

SEQ ID NO: 2116 - protein, 16 aa, SARS-CoV Virus
DPDYLMSVRLQCLHHA

SEQ ID NO: 2117 - protein, 18 aa, SARS-CoV Virus
HRRIVQSLIMIGVHAHLS

SEQ ID NO: 2118 - protein, 18 aa, SARS-CoV Virus
HIRVRCQDSLRSHTNPSY

SEQ ID NO: 2119 - protein, 9 aa, SARS-CoV Virus
NNHHHSNCM

SEQ ID NO: 2120 - protein, 26 aa, SARS-CoV Virus
RVFLLMYHNYPHQNDVEHRLNQPLCI

SEQ ID NO: 2121 - protein, 15 aa, SARS-CoV Virus
LDADVIYVVPCHHLL

SEQ ID NO: 2122 - protein, 11 aa, SARS-CoV Virus
KSHGQQPLDNL

SEQ ID NO: 2123 - protein, 4 aa, SARS-CoV Virus
PSYK

SEQ ID NO: 2124 - protein, 6 aa, SARS-CoV Virus
SLHVGS

SEQ ID NO: 2125 - protein, 20 aa, SARS-CoV Virus
LQSKSLINCLPHPSPGSDSN

SEQ ID NO: 2126 - protein, 24 aa, SARS-CoV Virus
FLGTLQNQHFFRCKYQKPCRRHQY

SEQ ID NO: 2127 - protein, 6 aa, SARS-CoV Virus
CLCRTV

SEQ ID NO: 2128 - protein, 10 aa, SARS-CoV Virus
DGLHLHRKPV

SEQ ID NO: 2129 - protein, 71 aa, SARS-CoV Virus
CIRRLHQGFAELVTTTAITFPHSADGTDCVSKCKTHWVISTSGRYLDVLTFQVTESFRIWMVNVASTIQTT

SEQ ID NO: 2130 - protein, 40 aa, SARS-CoV Virus
STTKGLLVHVSFWCYSNCLSCTSVCTQHLHTVGDWLSSTC

SEQ ID NO: 2131 - protein, 19 aa, SARS-CoV Virus
VILICFSRVYCKSTEGKHS

SEQ ID NO: 2132 - protein, 17 aa, SARS-CoV Virus
IGRYFCSISSLKTYCSS

SEQ ID NO: 2133 - protein, 8 aa, SARS-CoV Virus
TAQHHTSI

SEQ ID NO: 2134 - protein, 47 aa, SARS-CoV Virus
AFDEVQVFHFRPFWCVCNKPTRWFQFCVNCTCTITLRESSPFEILVV

SEQ ID NO: 2135 - protein, 34 aa, SARS-CoV Virus
CQHKPTSLRIVIVGKCIVISTSCLCGTSRTGHLS

SEQ ID NO: 2136 - protein, 9 aa, SARS-CoV Virus
CYWTQFIIL

SEQ ID NO: 2137 - protein, 11 aa, SARS-CoV Virus
SCNNKRPSQIW

SEQ ID NO: 2138 - protein, 138 aa, SARS-CoV Virus
IVHVNFTKLNNLAIRINNLLDFPECRCICKGVTITSVLVGTIIRDNNHEFGCCSQWYDVEWNTTITRIVDNVVKCIIIKLPKHSEEHCLHSTSYFCPLVLRSCLFVHLGHSLICHLFQLALHGSITVKLRFSHIQRFL

SEQ ID NO: 2139 - protein, 26 aa, SARS-CoV Virus
LFENDFRITISYSLLIGLLGSGISGI

SEQ ID NO: 2140 - protein, 4 aa, SARS-CoV Virus
RTKF

SEQ ID NO: 2141 - protein, 26 aa, SARS-CoV Virus
SNSLKSSTVIEHFLAQPINVYSTLHG

SEQ ID NO: 2142 - protein, 35 aa, SARS-CoV Virus
QNRQKRNHLLESFSCVFCKKNIIVELYTLCPQFRR

SEQ ID NO: 2143 - protein, 83 aa, SARS-CoV Virus
LYSKLLKNREQYHRCALYVRHFRLYSSNLDTWFTSNTQQLNVKLESINTTLRRQKPLGVHIPKFLCRDQVVINTKSKPEVTVE

SEQ ID NO: 2144 - protein, 12 aa, SARS-CoV Virus
TEKAKVAAATIA

SEQ ID NO: 2145 - protein, 9 aa, SARS-CoV Virus
ETINKHDTL

SEQ ID NO: 2146 - protein, 6 aa, SARS-CoV Virus
GVASNK

SEQ ID NO: 2147 - protein, 14 aa, SARS-CoV Virus
QWVILNTHKHYSSS

SEQ ID NO: 2148 - protein, 17 aa, SARS-CoV Virus
KHDSRNDTRIVRGYRNN

SEQ ID NO: 2149 - protein, 8 aa, SARS-CoV Virus
GPHGNSLI

SEQ ID NO: 2150 - protein, 37 aa, SARS-CoV Virus
SITIVDFVNKCNDIHQCPNTSSSIIINSASCHENKQN

SEQ ID NO: 2151 - protein, 45 aa, SARS-CoV Virus
SIHNTILKPITRQASVSQFKPCHDTHHPASRHVDHIKVSNCCKRR

SEQ ID NO: 2152 - protein, 39 aa, SARS-CoV Virus
QKQAQECVLMLNKQHSTCSNCHNTKSKWQESILVNKEKQ

SEQ ID NO: 2153 - protein, 9 aa, SARS-CoV Virus
PLCTLNKNQ

SEQ ID NO: 2154 - protein, 4 aa, SARS-CoV Virus
CQES

SEQ ID NO: 2155 - protein, 34 aa, SARS-CoV Virus
KHPMMSALNNFLELTLEGNTRALSNNIKWCKLIF

SEQ ID NO: 2156 - protein, 24 aa, SARS-CoV Virus
NSATKDSTTIHTILQQLFQSSTHI

SEQ ID NO: 2157 - protein, 59 aa, SARS-CoV Virus
DGNSCLSRKRSQYVNMILCQRFIVVLHCHKVKVIQSSGESIKKPPITIDNSSIQPCQNI

SEQ ID NO: 2158 - protein, 24 aa, SARS-CoV Virus
CYGCVCTCSLCSLSVNKWTIEFTF

SEQ ID NO: 2159 - protein, 32 aa, SARS-CoV Virus
VSTSVYSCWKLHMMHIAERHAIIINVKTNTTT

SEQ ID NO: 2160 - protein, 22 aa, SARS-CoV Virus
SIKERTFNGMIRSHGTLINTRW

SEQ ID NO: 2161 - protein, 5 aa, SARS-CoV Virus
TIVAC

SEQ ID NO: 2162 - protein, 102 aa, SARS-CoV Virus
KCLTRLDTDKFILGCLRVRSINFKPKQTILHRMANNTKLNIASLNKKAMVGFANEQIFIVRIKHVFCCANDMSWTVYCVIQPQSIKSCSSTGYLYHAPFNFA

SEQ ID NO: 2163 - protein, 16 aa, SARS-CoV Virus
RECHFPKTTLQNSRSD

SEQ ID NO: 2164 - protein, 11 aa, SARS-CoV Virus
CLWWLVENIST

SEQ ID NO: 2165 - protein, 5 aa, SARS-CoV Virus
VAKVI

SEQ ID NO: 2166 - protein, 12 aa, SARS-CoV Virus
VAASCFTIAGSI

SEQ ID NO: 2167 - protein, 10 aa, SARS-CoV Virus
GSTEILVLVI

SEQ ID NO: 2168 - protein, 18 aa, SARS-CoV Virus
SKIPVILCKWQQCLATQF

SEQ ID NO: 2169 - protein, 69 aa, SARS-CoV Virus
VHFLVEQKGTQSSLLEGTKCNSIKHDSFPKIVVKEPMAVLQRNTEYIDCCYPKRHNRRKHGKPLKVSQE

SEQ ID NO: 2170 - protein, 14 aa, SARS-CoV Virus
NIIGEIECQVQVKD

SEQ ID NO: 2171 - protein, 59 aa, SARS-CoV Virus
VDSRQKAVSWYQTEYSERHQKQKCISSNNMVVLTKNTSEFHKVVGSTSHQYGNNTTSHY

SEQ ID NO: 2172 - protein, 4 aa, SARS-CoV Virus
SRHI

SEQ ID NO: 2173 - protein, 25 aa, SARS-CoV Virus
STHRLHKRSKDVSYEIHRINTTENS

SEQ ID NO: 2174 - protein, 15 aa, SARS-CoV Virus
SSVMLIIKNPSTTGR

SEQ ID NO: 2175 - protein, 5 aa, SARS-CoV Virus
ANTYF

SEQ ID NO: 2176 - protein, 52 aa, SARS-CoV Virus
PFACTMSTVLSIKSCYYSNRTLQVSVRKLYDGTIHKHITSVWTKLTIRNRTL

SEQ ID NO: 2177 - protein, 53 aa, SARS-CoV Virus
QISVITIWHRFAHSILKNCTLSSKNASRGSKITILNEFGRCVANVANSTKNTR

SEQ ID NO: 2178 - protein, 15 aa, SARS-CoV Virus
KMQEVTIDCSQHSTR

SEQ ID NO: 2179 - protein, 24 aa, SARS-CoV Virus
ARHYETNLSCNDSSYYRAAFVIFV

SEQ ID NO: 2180 - protein, 46 aa, SARS-CoV Virus
TTTLAKPCVKTSMFICKTIISRNDVTSDTILNGFVTNDFICVTIMD

SEQ ID NO: 2181 - protein, 18 aa, SARS-CoV Virus
QCMYWHNDITNQCSKNAQ

SEQ ID NO: 2182 - protein, 18 aa, SARS-CoV Virus
CGLKHKFKTSTNNLTTLE

SEQ ID NO: 2183 - protein, 16 aa, SARS-CoV Virus
DFSSYDIDNLSSCSTS

SEQ ID NO: 2184 - protein, 20 aa, SARS-CoV Virus
CKRYVVLLGSSTNLFTQLFR

SEQ ID NO: 2185 - protein, 10 aa, SARS-CoV Virus
RHVVFYIPDE

SEQ ID NO: 2186 - protein, 46 aa, SARS-CoV Virus
NIVTFCYLGIDMPCITVNTCAKISGRHVFNLIIGEHEIVTTVTCHF

SEQ ID NO: 2187 - protein, 4 aa, SARS-CoV Virus
VRVM

SEQ ID NO: 2188 - protein, 22 aa, SARS-CoV Virus
KFETFNNILCVNIGINNTLSGS

SEQ ID NO: 2189 - protein, 8 aa, SARS-CoV Virus
HECRKDTI

SEQ ID NO: 2190 - protein, 5 aa, SARS-CoV Virus
SYTLC

SEQ ID NO: 2191 - protein, 20 aa, SARS-CoV Virus
LAVSCSNKCLKFFHRNTKSC

SEQ ID NO: 2192 - protein, 20 aa, SARS-CoV Virus
KGVDISIKHLNGNFSTISNV

SEQ ID NO: 2193 - protein, 42 aa, SARS-CoV Virus
YKSLVKQQNRLAHQLTVVHRSRLRSRLVAFGLAIKNYDINRQ

SEQ ID NO: 2194 - protein, 10 aa, SARS-CoV Virus
TFSVVSSQIV

SEQ ID NO: 2195 - protein, 36 aa, SARS-CoV Virus
IDKMGERMSLIGLLTSLVKVEVKRAIFHSNTINNIR

SEQ ID NO: 2196 - protein, 12 aa, SARS-CoV Virus
LVSRVDWSFKLE

SEQ ID NO: 2197 - protein, 129 aa, SARS-CoV Virus
QITSNFITNECTTSAKCVTIETIPIVSLAEATASICIDIERSLHAINNSCTLNACGTIALIAHHASRRGATIHDMNIALPYVVERSKEDVHPNHCRNGCHLYNTNDKPHEPRIADEMTSKIAKEHLHYS

SEQ ID NO: 2198 - protein, 18 aa, SARS-CoV Virus
IKEFCEQHICQNPLSGQT

SEQ ID NO: 2199 - protein, 4 aa, SARS-CoV Virus
NCQV

SEQ ID NO: 2200 - protein, 16 aa, SARS-CoV Virus
NRHLNGFKSWIRIKGV

SEQ ID NO: 2201 - protein, 37 aa, SARS-CoV Virus
TNAARKRTFTEIHSSNVRRIKIQFSNAITIRRSTKIR

SEQ ID NO: 2202 - protein, 10 aa, SARS-CoV Virus
EYTKSSSYTD

SEQ ID NO: 2203 - protein, 12 aa, SARS-CoV Virus
PHSDCEQFRKFG

SEQ ID NO: 2204 - protein, 10 aa, SARS-CoV Virus
LHIINAGIQT

SEQ ID NO: 2205 - protein, 14 aa, SARS-CoV Virus
FSNTLNTIFSNSCR

SEQ ID NO: 2206 - protein, 17 aa, SARS-CoV Virus
SSNSRIGTFSKSTQLEQ

SEQ ID NO: 2207 - protein, 14 aa, SARS-CoV Virus
CKHIRHIIVKHTLC

SEQ ID NO: 2208 - protein, 5 aa, SARS-CoV Virus
SLSAI

SEQ ID NO: 2209 - protein, 7 aa, SARS-CoV Virus
CCNCCLS

SEQ ID NO: 2210 - protein, 26 aa, SARS-CoV Virus
EWFDISQNFTPRNTINCSNTMSGNCF

SEQ ID NO: 2211 - protein, 23 aa, SARS-CoV Virus
KLIRFLNGNACVFHISSHKILMT

SEQ ID NO: 2212 - protein, 9 aa, SARS-CoV Virus
LLCYFNTFI

SEQ ID NO: 2213 - protein, 55 aa, SARS-CoV Virus
WFKYDIAYNFGSFHVTLYDFLLYGRIFHYFFRGGLLTFTSKIVHSLCVFYCQNFK

SEQ ID NO: 2214 - protein, 11 aa, SARS-CoV Virus
SIYWLCTPKTT

SEQ ID NO: 2215 - protein, 24 aa, SARS-CoV Virus
TPSVWFERCLGCSLVNVPNNWLMQ

SEQ ID NO: 2216 - protein, 8 aa, SARS-CoV Virus
FSTFLETR

SEQ ID NO: 2217 - protein, 20 aa, SARS-CoV Virus
IVSIVNSHYIAIQVWEECDR

SEQ ID NO: 2218 - protein, 10 aa, SARS-CoV Virus
SWLCEACHLI

SEQ ID NO: 2219 - protein, 20 aa, SARS-CoV Virus
IISKFCVRTCEFEIIKTRIW

SEQ ID NO: 2220 - protein, 62 aa, SARS-CoV Virus
WLSWYKVYRLLCIVSIILFIIPIQFWFNLCVSNSIEFIRHRLDGCSVRCFLVENISHWSFVL

SEQ ID NO: 2221 - protein, 34 aa, SARS-CoV Virus
HLCKVSSVNTIEGLLSSYMSVMTTLIVTSVLIRT

SEQ ID NO: 2222 - protein, 5 aa, SARS-CoV Virus
ECTLL

SEQ ID NO: 2223 - protein, 18 aa, SARS-CoV Virus
FILSRWCRHHNKRRLLLY

SEQ ID NO: 2224 - protein, 22 aa, SARS-CoV Virus
ILCSITTTHTWNGNTCLKIIIR

SEQ ID NO: 2225 - protein, 11 aa, SARS-CoV Virus
STHIHHSFYTR

SEQ ID NO: 2226 - protein, 25 aa, SARS-CoV Virus
GSSFLTTMFTHHIKNSLCRFQISML

SEQ ID NO: 2227 - protein, 54 aa, SARS-CoV Virus
KMGHSFSDITKLANSFITVSEYECTKVSSITSTGSIISLLKCWCIEFDFKLLKC

SEQ ID NO: 2228 - protein, 13 aa, SARS-CoV Virus
NTRQITIVISPFN

SEQ ID NO: 2229 - protein, 13 aa, SARS-CoV Virus
TTNLRKFPFLCVV

SEQ ID NO: 2230 - protein, 22 aa, SARS-CoV Virus
SRHVPTKKTLIKSMVVLESFTT

SEQ ID NO: 2231 - protein, 5 aa, SARS-CoV Virus
CVITR

SEQ ID NO: 2232 - protein, 60 aa, SARS-CoV Virus
YKESLTLMIYMRFNFCNISTIQVCWTKLLSICHRHIHKLCVEISVVHSCEHFYSLNLPQG

SEQ ID NO: 2233 - protein, 29 aa, SARS-CoV Virus
KNLTVKMKLDGALQSVVHNFVTTLKKFNT

SEQ ID NO: 2234 - protein, 5 aa, SARS-CoV Virus
LCTLS

SEQ ID NO: 2235 - protein, 22 aa, SARS-CoV Virus
IGPISVRASQRNCFYKVLLRCL

SEQ ID NO: 2236 - protein, 13 aa, SARS-CoV Virus
RSEVSIICSNSIW

SEQ ID NO: 2237 - protein, 34 aa, SARS-CoV Virus
HYGRSFKRTHTARSLFKIKTMCHITNWHCDKRLI

SEQ ID NO: 2238 - protein, 52 aa, SARS-CoV Virus
RVQLRNNRSYRLFTSIKEESDTIVNDALLNFNSFILTLDGCHYGSNIHAYRH

SEQ ID NO: 2239 - protein, 19 aa, SARS-CoV Virus
FSCLFSMSKHFSQIPGYSS

SEQ ID NO: 2240 - protein, 9 aa, SARS-CoV Virus
NLFLSIRCF

SEQ ID NO: 2241 - protein, 41 aa, SARS-CoV Virus
YIKCRFAFLKSSLSFLKCITSTSLSRVRGYILINWHFLQSS

SEQ ID NO: 2242 - protein, 60 aa, SARS-CoV Virus
EHLSSATSLFGGYYNTSDITTSDNITYHVRCILLKERHIFTSKHVLRIMVKLTIDISKQE

SEQ ID NO: 2243 - protein, 88 aa, SARS-CoV Virus
LIGKKLSFFQCCGNLINAGLNFWLHIDRLLYDRFLLSFGIFCVWWLLLFRCFHSRLQVIKIIHDNLLIKSFVIDCNINLCTNRLHAHL

SEQ ID NO: 2244 - protein, 11 aa, SARS-CoV Virus
RLKWFSTKYAC

SEQ ID NO: 2245 - protein, 5 aa, SARS-CoV Virus
QQWCK

SEQ ID NO: 2246 - protein, 17 aa, SARS-CoV Virus
IEIFICCLKKLDVLTCI

SEQ ID NO: 2247 - protein, 28 aa, SARS-CoV Virus
VRSNNMQTLLSKIMSRKQTRPSYCKRAI

SEQ ID NO: 2248 - protein, 60 aa, SARS-CoV Virus
LNVIITLLLHGTIGCLVECTCYTTTMFQVYVSSIYNHHRISTLCLLNDVNTFNGNIVSKF

SEQ ID NO: 2249 - protein, 20 aa, SARS-CoV Virus
ITSKLINWFFRCRFWFWLNL

SEQ ID NO: 2250 - protein, 21 aa, SARS-CoV Virus
LLSSIIQPVFLFFFLNSNCFS

SEQ ID NO: 2251 - protein, 47 aa, SARS-CoV Virus
GTKFQRETLIIILCTVLMFTGFINFFFLTLCIVLFFLIWRVKGTIHT

SEQ ID NO: 2252 - protein, 9 aa, SARS-CoV Virus
KVFFTSIIK

SEQ ID NO: 2253 - protein, 23 aa, SARS-CoV Virus
VECSYTPLIKINTHVGKEIRNWL

SEQ ID NO: 2254 - protein, 68 aa, SARS-CoV Virus
SLHNSLCYNTCKLSNFGTGFNSVDRALFIKHFVNTFIKLKCDSHILVTLNFPNSIFSKGYTFNWCTPF

SEQ ID NO: 2255 - protein, 8 aa, SARS-CoV Virus
AKDIVCSQ

SEQ ID NO: 2256 - protein, 14 aa, SARS-CoV Virus
TRRQCAVLFFVLNL

SEQ ID NO: 2257 - protein, 44 aa, SARS-CoV Virus
EHEAIYTDWCADDSSICEAINGRLECFEFTVLENNLLRGKYCVM

SEQ ID NO: 2258 - protein, 16 aa, SARS-CoV Virus
ITFKKGYFFWCLKRHE

SEQ ID NO: 2259 - protein, 23 aa, SARS-CoV Virus
LQLLLATYTLTVKSLALSDEDFT

SEQ ID NO: 2260 - protein, 33 aa, SARS-CoV Virus
SQLCASDSDLINAHFECLVNNINEAFYTILDVI

SEQ ID NO: 2261 - protein, 79 aa, SARS-CoV Virus
SNLYLTLDDVKNTCNEKFENLPSILEKFNSCTKFRLNPFKDRPEFFNSSAQKIRQPLRSLLYKTTSYICHNNDTVGEQV

SEQ ID NO: 2262 - protein, 9 aa, SARS-CoV Virus
SINHGVDKT

SEQ ID NO: 2263 - protein, 18 aa, SARS-CoV Virus
LFRNTIKYGDSCSLQIRN

SEQ ID NO: 2264 - protein, 11 aa, SARS-CoV Virus
VVCCIKCARKN

SEQ ID NO: 2265 - protein, 7 aa, SARS-CoV Virus
SDNTSSL

SEQ ID NO: 2266 - protein, 7 aa, SARS-CoV Virus
GKTTQWC

SEQ ID NO: 2267 - protein, 94 aa, SARS-CoV Virus
SLLSNVPSTFYGLSLGNFIVTAGLNNGFERLVIKTLYSVNKGTCRSRERCQNDGNLFIQMKIANNVNVNTFTTQYLKEILIQGLHIVTSNASMA

SEQ ID NO: 2268 - protein, 41 aa, SARS-CoV Virus
ANISTSTRNPVGTLIIAANIGKHTASKTSSPTSLAESSFNV

SEQ ID NO: 2269 - protein, 30 aa, SARS-CoV Virus
VVVIICNTMLRSNLWVLTGRTWHFHYSISR

SEQ ID NO: 2270 - protein, 10 aa, SARS-CoV Virus
VPTCSRSFNN

SEQ ID NO: 2271 - protein, 18 aa, SARS-CoV Virus
IFSATMFTSGFQKVARLP

SEQ ID NO: 2272 - protein, 50 aa, SARS-CoV Virus
NFIAMITFHQGRQVHIVTLLWRCNRVHRAYTPHETLSLFLFNTWLNDFDF

SEQ ID NO: 2273 - protein, 67 aa, SARS-CoV Virus
VKRKHKLWAFPFESVKFLGTLNFEGCLVLVALIRALSEPGNFMLMVTAAVDTSLRLDVIKLFGKSAH

SEQ ID NO: 2274 - protein, 65 aa, SARS-CoV Virus
LARACEKIFDAIKRVPIWATEIVVDIASDCTSIELTSEFTECTTAMLSVPVLFIIFNGISAKLVT

SEQ ID NO: 2275 - protein, 4 aa, SARS-CoV Virus
VIRL

SEQ ID NO: 2276 - protein, 62 aa, SARS-CoV Virus
IDAIAMTTGSLITVLTKKNIAVCNWGFAHMWHEYSQCYTATTVLNAVHFCNQLNDLVAVIGA

SEQ ID NO: 2277 - protein, 23 aa, SARS-CoV Virus
GIRTFNEHIGLFKLGQYAFFQLY

SEQ ID NO: 2278 - protein, 13 aa, SARS-CoV Virus
TTSAIFEVFTCLR

SEQ ID NO: 2279 - protein, 11 aa, SARS-CoV Virus
GLFHRVPEATH

SEQ ID NO: 2280 - protein, 36 aa, SARS-CoV Virus
HVSNLKDRQTELDVCFLVDTKNKALHLTFRSHPDET

SEQ ID NO: 2281 - protein, 8 aa, SARS-CoV Virus
STATRTKP

SEQ ID NO: 2282 - protein, 58 aa, SARS-CoV Virus
AVCRRGTSYSFLVNDSKIYYCLYCVGALGMQPSDSYTDFKVRLENRSTRDRGWLAFPG

SEQ ID NO: 2283 - DNA, 29742 bp, SARS-CoV Virus; identical to SEQ ID NO: 1801
  CDS (2)..(29740)

SEQ ID NO: 2284 - protein, 8 aa, SARS-CoV Virus
FFFFLSFS

SEQ ID NO: 2285 - protein, 8 aa, SARS-CoV Virus
EAIKITWG

SEQ ID NO: 2286 - protein, 13 aa, SARS-CoV Virus
FYTLGLFHIGSSP

SEQ ID NO: 2287 - protein, 14 aa, SARS-CoV Virus
HYSLYPRSYSAWPR

SEQ ID NO: 2288 - protein, 15 aa, SARS-CoV Virus
KCGGSFKSSLMLHID

SEQ ID NO: 2289 - protein, 9 aa, SARS-CoV Virus
RLLCEIKVN

SEQ ID NO: 2290 - protein, 15 aa, SARS-CoV Virus
TYLCCLVTRIHSAQE

SEQ ID NO: 2291 - protein, 26 aa, SARS-CoV Virus
TMYRKRNCENVYIAHLPCVVIMSVYA

SEQ ID NO: 2292 - protein, 11 aa, SARS-CoV Virus
VESAEAPLMEF

SEQ ID NO: 2293 - protein, 27 aa, SARS-CoV Virus
SCLEKSSMSAAGRRVTVGCFFCLCGKG

SEQ ID NO: 2294 - protein, 45 aa, SARS-CoV Virus
ASSVFFFLSFLGSVGGNVLYASMCLFSSMTLSLNCGSLSSNLMAP

SEQ ID NO: 2295 - protein, 34 aa, SARS-CoV Virus
VSHVPEGVTSMPMRDIPKNAEALGANCAICGQCL

SEQ ID NO: 2296 - protein, 25 aa, SARS-CoV Virus
SVPCLIRSWSPKFPWVCSGPRLPNA

SEQ ID NO: 2297 - protein, 90 aa, SARS-CoV Virus
VTLYCFVAVRFWRGFLDASAADFLVTVWPCCCWPLPETLLSSWFNLSSSNSARAVSPPPLAIRAGEFPLLLPGVEFLELPRLRDEEREEA

SEQ ID NO: 2298 - protein, 8 aa, SARS-CoV Virus
LPPLLPSA

SEQ ID NO: 2299 - protein, 8 aa, SARS-CoV Virus
KPFGNVVP

SEQ ID NO: 2300 - protein, 39 aa, SARS-CoV Virus
GSCSTVAALLLGLRVPMWSLGVFKAPSVATHTMPSLLAP

SEQ ID NO: 2301 - protein, 10 aa, SARS-CoV Virus
GSEASGPVPR

SEQ ID NO: 2302 - protein, 23 aa, SARS-CoV Virus
KYHLGLSSFILPSPPRTRRVALR

SEQ ID NO: 2303 - protein, 27 aa, SARS-CoV Virus
PIWSSGPLLVLIGTPWPRGNLSSSLPC

SEQ ID NO: 2304 - protein, 64 aa, SARS-CoV Virus
VRAVNQDAVLLGKPWGRRCFGLAPLRPPFWLLSVESVGPPNVMRGALRWFDWGPLSDILICSFI

SEQ ID NO: 2305 - protein, 50 aa, SARS-CoV Virus
NNKYVSKCSSLVTFMKVPTPSYKRTTSWILTVDSNIRCACLNHSVPSMKR

SEQ ID NO: 2306 - protein, 26 aa, SARS-CoV Virus
STKPSSAISITPSVVPYKDLQAHEVY

SEQ ID NO: 2307 - protein, 20 aa, SARS-CoV Virus
MHSAVLQCICNCIEKYKSKQ

SEQ ID NO: 2308 - protein, 24 aa, SARS-CoV Virus
EVSCSFRLWYKVLLDPGFRVKTKI

SEQ ID NO: 2309 - protein, 20 aa, SARS-CoV Virus
ALLKQGIAERLKSTNRSQLK

SEQ ID NO: 2310 - protein, 14 aa, SARS-CoV Virus
AHSFCLSLNGEAKY

SEQ ID NO: 2311 - protein, 24 aa, SARS-CoV Virus
SSNNEKKWRVELLLNLLLSDEKFW

SEQ ID NO: 2312 - protein, 24 aa, SARS-CoV Virus
SCTQLIGMSSTVSTSKSKVCASAS

SEQ ID NO: 2313 - protein, 11 aa, SARS-CoV Virus
CKFIVSKRVKW

SEQ ID NO: 2314 - protein, 6 aa, SARS-CoV Virus
IALVCS

SEQ ID NO: 2315 - protein, 5 aa, SARS-CoV Virus
WARFF

SEQ ID NO: 2316 - protein, 12 aa, SARS-CoV Virus
YSRTSNTLLIVI

SEQ ID NO: 2317 - protein, 25 aa, SARS-CoV Virus
LARCKYNQCQEENNFHVRFMDNLTP

SEQ ID NO: 2318 - protein, 11 aa, SARS-CoV Virus
VLHHLTPNNSS

SEQ ID NO: 2319 - protein, 9 aa, SARS-CoV Virus
IIVSLLNLL

SEQ ID NO: 2320 - protein, 5 aa, SARS-CoV Virus
RQDSK

SEQ ID NO: 2321 - protein, 6 aa, SARS-CoV Virus
SISLLL

SEQ ID NO: 2322 - protein, 31 aa, SARS-CoV Virus
PGSQQDETSVVTYCTSKAILSLLPAWSVFNL

SEQ ID NO: 2323 - protein, 4 aa, SARS-CoV Virus
FPIR

SEQ ID NO: 2324 - protein, 19 aa, SARS-CoV Virus
RLYAAKPESVPTRCDAPNL

SEQ ID NO: 2325 - protein, 29 aa, SARS-CoV Virus
ESVRDVATVISFGRSLMSQRPRECPAIRK

SEQ ID NO: 2326 - protein, 52 aa, SARS-CoV Virus
PRMITAPMTSSLSMSGLVTIVPRRGTLRRMFVSGLNDHIERVRANSLKEATK

SEQ ID NO: 2327 - protein, 23 aa, SARS-CoV Virus
LSHIKPTIQAIAIAIPPVTQLIL

SEQ ID NO: 2328 - protein, 31 aa, SARS-CoV Virus
TTASTKQASVTGHKSQRKTSFIMYKNLFRLE

SEQ ID NO: 2329 - protein, 68 aa, SARS-CoV Virus
ANCSNIIQARNRKPITRFHCSRSCLSSSTVIVPLSAMISNVKVPNRIIIIVSSFRPEDQELLQKSSDF

SEQ ID NO: 2330 - protein, 14 aa, SARS-CoV Virus
HASRRKPLVLLNSR

SEQ ID NO: 2331 - protein, 12 aa, SARS-CoV Virus
QYCSSTHTIEAQ

SEQ ID NO: 2332 - protein, 4 aa, SARS-CoV Virus
GWLV

SEQ ID NO: 2333 - protein, 14 aa, SARS-CoV Virus
LARIPRKQEKEVRY

SEQ ID NO: 2334 - protein, 13 aa, SARS-CoV Virus
LLTYLFLPKRMST

SEQ ID NO: 2335 - protein, 12 aa, SARS-CoV Virus
VRTHFLVLTKAR

SEQ ID NO: 2336 - protein, 13 aa, SARS-CoV Virus
SSSAHHKLDPLLD

SEQ ID NO: 2337 - protein, 17 aa, SARS-CoV Virus
QLLKSRRLCVFAHSVGL

SEQ ID NO: 2338 - protein, 7 aa, SARS-CoV Virus
HFQYQCL

SEQ ID NO: 2339 - protein, 8 aa, SARS-CoV Virus
TQAGSKLR

SEQ ID NO: 2340 - protein, 9 aa, SARS-CoV Virus
NSHVQRHSL

SEQ ID NO: 2341 - protein, 16 aa, SARS-CoV Virus
HLSAYPQNNHQFGSLL

SEQ ID NO: 2342 - protein, 10 aa, SARS-CoV Virus
VLVLKCRHLQ

SEQ ID NO: 2343 - protein, 5 aa, SARS-CoV Virus
RQLYL

SEQ ID NO: 2344 - protein, 38 aa, SARS-CoV Virus
HCYMVYSSHSYVCASKQSSWHHKVMGSWICTSNKANIS

SEQ ID NO: 2345 - protein, 4 aa, SARS-CoV Virus
FYMR

SEQ ID NO: 2346 - protein, 29 aa, SARS-CoV Virus
CIVENISRHRGTKIAPPYLQRQAKDVNRW

SEQ ID NO: 2347 - protein, 8 aa, SARS-CoV Virus
QIAAVNCK

SEQ ID NO: 2348 - protein, 13 aa, SARS-CoV Virus
TGSPYKGLAAIFY

SEQ ID NO: 2349 - protein, 5 aa, SARS-CoV Virus
AQLFW

SEQ ID NO: 2350 - protein, 11 aa, SARS-CoV Virus
RSEKQQEMQRQ

SEQ ID NO: 2351 - protein, 15 aa, SARS-CoV Virus
QAIRKGVRLVAVSLL

SEQ ID NO: 2352 - protein, 17 aa, SARS-CoV Virus
HEQYLQEKHCQFLLAVQ

SEQ ID NO: 2353 - protein, 4 aa, SARS-CoV Virus
LIQE

SEQ ID NO: 2354 - protein, 6 aa, SARS-CoV Virus
VRLCVM

SEQ ID NO: 2355 - protein, 45 aa, SARS-CoV Virus
FDTLENWLRVILIKLAARTTRACTLEATATTSHATKQDCNHDDGN

SEQ ID NO: 2356 - protein, 27 aa, SARS-CoV Virus
SSNEAEPNIPRPFNILLIFSQFLKVNE

SEQ ID NO: 2357 - protein, 22 aa, SARS-CoV Virus
IFSDLIEAVNFFLNVDDRSVNA

SEQ ID NO: 2358 - protein, 8 aa, SARS-CoV Virus
NVAKINIW

SEQ ID NO: 2359 - protein, 13 aa, SARS-CoV Virus
CMIFEVLVQLFFE

SEQ ID NO: 2360 - protein, 23 aa, SARS-CoV Virus
VKLRLQRIINCVVNDANNDITIS

SEQ ID NO: 2361 - protein, 59 aa, SARS-CoV Virus
DKCIVCSNYLWRKEVPLCNKPRSAIKHKNTFTREVCFAFMTNCWRCGEVPLLGWHIRDM

SEQ ID NO: 2362 - protein, 25 aa, SARS-CoV Virus
EDNTMRGCLWEGHKVVALSTKVNSF

SEQ ID NO: 2363 - protein, 24 aa, SARS-CoV Virus
LSKNTLRHFSSSKISRSPDFSSPD

SEQ ID NO: 2364 - protein, 15 aa, SARS-CoV Virus
LLCYIGLKALKSACN

SEQ ID NO: 2365 - protein, 18 aa, SARS-CoV Virus
PVNLYLRLDFIKSRKDII

SEQ ID NO: 2366 - protein, 14 aa, SARS-CoV Virus
NCTKIRAKLFNKCV

SEQ ID NO: 2367 - protein, 16 aa, SARS-CoV Virus
CLSILVNNVLQLAQCS

SEQ ID NO: 2368 - protein, 4 aa, SARS-CoV Virus
CCCK

SEQ ID NO: 2369 - protein, 59 aa, SARS-CoV Virus
FLNLTNRLVKLVGDLFLVLIENILGNSNAIEPICHLHSKRYLKSSASTKCPSSSGSTTN

SEQ ID NO: 2370 - protein, 35 aa, SARS-CoV Virus
SSSVGSNHIISEQRWQHCKSIELLRTNEISSINIT

SEQ ID NO: 2371 - protein, 30 aa, SARS-CoV Virus
AFAILLHEASISECHLIKEQVLNKRPLSWL

SEQ ID NO: 2372 - protein, 34 aa, SARS-CoV Virus
KIKTTKIFQSWGFVHLFDLSEHFTCVAILFSSNT

SEQ ID NO: 2373 - protein, 4 aa, SARS-CoV Virus
ECTI

SEQ ID NO: 2374 - protein, 43 aa, SARS-CoV Virus
LCAKATILEKQISTFSRISADVHITIYGGFSHRNRHYFCSNAN

SEQ ID NO: 2375 - protein, 14 aa, SARS-CoV Virus
KVSRYSNGVIRVSN

SEQ ID NO: 2376 - protein, 4 aa, SARS-CoV Virus
TIST

SEQ ID NO: 2377 - protein, 14 aa, SARS-CoV Virus
RHSISHNRFLASTT

SEQ ID NO: 2378 - protein, 67 aa, SARS-CoV Virus
RNCMVTSTNASSNRNVALIRSVDMLSSYKTACLSLEYIVSSRIYAPSWCELICMNCCRNISAVNILI

SEQ ID NO: 2379 - protein, 5 aa, SARS-CoV Virus
NSNFR

SEQ ID NO: 2380 - protein, 16 aa, SARS-CoV Virus
SICSRCNYTYTPKRAR

SEQ ID NO: 2381 - protein, 28 aa, SARS-CoV Virus
YFRCFRISNGISEIRNITAKLLKWLKSL

SEQ ID NO: 2382 - protein, 22 aa, SARS-CoV Virus
HTSTSESIKIKIDTLVLNKVSG

SEQ ID NO: 2383 - protein, 10 aa, SARS-CoV Virus
FWSTNRGRCI

SEQ ID NO: 2384 - protein, 25 aa, SARS-CoV Virus
KFKRKYYNSVRLVANASSGVKTIII

SEQ ID NO: 2385 - protein, 45 aa, SARS-CoV Virus
WPITIKSRWGARFAIRGERHIRYVSLKGPKLAMSKIPIFIIIITS

SEQ ID NO: 2386 - protein, 69 aa, SARS-CoV Virus
SSINVPSIPSKDTTHEIIWQFIIIISNNTSLSWRYLSYIISLDYKRICIDIGEAKIIQLSGRNAIALKG

SEQ ID NO: 2387 - protein, 47 aa, SARS-CoV Virus
VVEHRVISNTIRNFFSLPCIDRREFSSIKNLSKRTQVCNIRESHNIS

SEQ ID NO: 2388 - protein, 52 aa, SARS-CoV Virus
GNNPEIRGLVNSFVNLKALNRAFEFSKWILRTINSICDCTIFIILEHKCSWL

SEQ ID NO: 2389 - protein, 8 aa, SARS-CoV Virus
IANKIGCS

SEQ ID NO: 2390 - protein, 8 aa, SARS-CoV Virus
RAPNVLSR

SEQ ID NO: 2391 - protein, 29 aa, SARS-CoV Virus
KGCKNGSKICNVNTKRQLKNRFQSVKTRR

SEQ ID NO: 2392 - protein, 26 aa, SARS-CoV Virus
ITNYIYRLIALINIEKPIFIFKHKLS

SEQ ID NO: 2393 - protein, 5 aa, SARS-CoV Virus
VFKIT

SEQ ID NO: 2394 - protein, 61 aa, SARS-CoV Virus
NIKRKGIRYVLESAIKCIIEYHSMCLCTHGFRNSKERVVTQFKVTCSYNNISRIVNNNHRL

SEQ ID NO: 2395 - protein, 15 aa, SARS-CoV Virus
LVVHGRTKNPTTDNI

SEQ ID NO: 2396 - protein, 36 aa, SARS-CoV Virus
FLCGSKINTILKRYDRVAKRMINSMKPCNIRIKWKK

SEQ ID NO: 2397 - protein, 4 aa, SARS-CoV Virus
IKSV

SEQ ID NO: 2398 - protein, 13 aa, SARS-CoV Virus
SKNFIRIVNPPHR

SEQ ID NO: 2399 - protein, 28 aa, SARS-CoV Virus
SMLSVIRSLNIIKSGAPVKVTTTSESKK

SEQ ID NO: 2400 - protein, 14 aa, SARS-CoV Virus
ENKHVRLVVNKNIT

SEQ ID NO: 2401 - protein, 36 aa, SARS-CoV Virus
NHNSVVFSNDKPTFFQKRINHIIDLILLKRHYSSSS

SEQ ID NO: 2402 - protein, 10 aa, SARS-CoV Virus
FKRKFAHVKE

SEQ ID NO: 2403 - protein, 36 aa, SARS-CoV Virus
IGRQLDRICVPPENVVSMHGIAINLFLRLAKIVSPN

SEQ ID NO: 2404 - protein, 4 aa, SARS-CoV Virus
KCFR

SEQ ID NO: 2405 - protein, 11 aa, SARS-CoV Virus
CIYICNKSCPP

SEQ ID NO: 2406 - protein, 26 aa, SARS-CoV Virus
EMAHKLVKVSIPRMLCYLYSYRTTQG

SEQ ID NO: 2407 - protein, 49 aa, SARS-CoV Virus
FLLYKSTQISEKPFFRVILFCHMFGPRVIHIANNKVPFISRMYCCTVSN

SEQ ID NO: 2408 - protein, 12 aa, SARS-CoV Virus
SRICVGDEVIKI

SEQ ID NO: 2409 - protein, 34 aa, SARS-CoV Virus
CASWQPLSEHSCTWCNSFIRASTKVNNSHVVGYS

SEQ ID NO: 2410 - protein, 4 aa, SARS-CoV Virus
SKCI

SEQ ID NO: 2411 - protein, 54 aa, SARS-CoV Virus
VLTQLSILCDIHHYSFWYNSIFTIILKVTLFKKHSLHLVQVRHRNTWLPRLTCL

SEQ ID NO: 2412 - protein, 16 aa, SARS-CoV Virus
FWVEGFNMSILTPKHE

SEQ ID NO: 2413 - protein, 12 aa, SARS-CoV Virus
NFSIVNCNLDHF

SEQ ID NO: 2414 - protein, 9 aa, SARS-CoV Virus
LYYLDKVIK

SEQ ID NO: 2415 - protein, 9 aa, SARS-CoV Virus
KINHRTHTF

SEQ ID NO: 2416 - protein, 21 aa, SARS-CoV Virus
TCLRICYEVIFHCAVHRDKIL

SEQ ID NO: 2417 - protein, 42 aa, SARS-CoV Virus
MKTAKLSMTEISINDVFEGIALELISLYEFIHSELEKVSFHL

SEQ ID NO: 2418 - protein, 6 aa, SARS-CoV Virus
SGLKIL

SEQ ID NO: 2419 - protein, 28 aa, SARS-CoV Virus
VSALSKVGFRQLLNNAVYFLKVVKLCFY

SEQ ID NO: 2420 - protein, 12 aa, SARS-CoV Virus
CDSIDASLCWSL

SEQ ID NO: 2421 - protein, 4 aa, SARS-CoV Virus
TFCY

SEQ ID NO: 2422 - protein, 23 aa, SARS-CoV Virus
NTITGVSKKVYLSFHSTIKQDSK

SEQ ID NO: 2423 - protein, 115 aa, SARS-CoV Virus
RTSTLSRFLGNVSHCADTYCRYMCWGFSFVVPDYSISSDINTQIIEYLNLWHWFNVTLSPKLKCNINRKCCLIFKDLHINTIYLCVNSIINDGNRCFAGVSIKVSFINNIISHIF

SEQ ID NO: 2424 - protein, 17 aa, SARS-CoV Virus
PGKCIPQVISIKLFVNP

SEQ ID NO: 2425 - protein, 28 aa, SARS-CoV Virus
AKSSRNHHIICIQVLSVLICMVSANSTT

SEQ ID NO: 2426 - protein, 39 aa, SARS-CoV Virus
IASCNTRSRFEWNIINIRHYLFAMRLTRTIRIVKERQLL

SEQ ID NO: 2427 - protein, 27 aa, SARS-CoV Virus
ISKCTFIESWSVECMLIHIQTTTITAW

SEQ ID NO: 2428 - protein, 126 aa, SARS-CoV Virus
QDSCVKPTHNCIGWVTINVTIPKQTNTISEFIVMCSIRIEEFLYFVSFVTTWLSIVELPFYFSLRHTLDSLWISNVMKNWKLISKQCRLHNHVLYFSASRINPQFISYNRVFNRPINALNKALMDC

SEQ ID NO: 2429 - protein, 58 aa, SARS-CoV Virus
TSSHDSITTSHMCISMYLAMLVMVTLKVTRKAPLLNINHKWVIDIVKTHRMIPAGISI

SEQ ID NO: 2430 - protein, 25 aa, SARS-CoV Virus
SRKASCTFVTQTTRSFRSNLDKVLH

SEQ ID NO: 2431 - protein, 15 aa, SARS-CoV Virus
CKLKAMRPKDEHDSV

SEQ ID NO: 2432 - protein, 60 aa, SARS-CoV Virus
QSFQCITEHLYYLNTHYIPGQAFIHEWYKMFKLVTWWRFCINSGEFCVIFSVNITSRYSY

SEQ ID NO: 2433 - protein, 7 aa, SARS-CoV Virus
VNTCRKS

SEQ ID NO: 2434 - protein, 66 aa, SARS-CoV Virus
VSTHSISSCMTALYIKANPRTNVTNSFFAGDKHIRVTIDLVIHFETHHRDESTVGHVLWYAWYVNT

SEQ ID NO: 2435 - protein, 38 aa, SARS-CoV Virus
SFSLEFYINAEVCRCLCRMKTSNDLTTVLKKSSYIFCL

SEQ ID NO: 2436 - protein, 9 aa, SARS-CoV Virus
CSHIATWYF

SEQ ID NO: 2437 - protein, 53 aa, SARS-CoV Virus
TCKLQFVIKISIRHYAQNANFCPCDSHIEAVDITRVCCFSSLCEYDIVIFRTL

SEQ ID NO: 2438 - protein, 8 aa, SARS-CoV Virus
INSLRRQS

SEQ ID NO: 2439 - protein, 5 aa, SARS-CoV Virus
SYSVL

SEQ ID NO: 2440 - protein, 27 aa, SARS-CoV Virus
DKNSFSPSRIACKKFSYNAYLRSVDCR

SEQ ID NO: 2441 - protein, 16 aa, SARS-CoV Virus
NIMCNNTFVEHFEALS

SEQ ID NO: 2442 - protein, 6 aa, SARS-CoV Virus
LILVCF

SEQ ID NO: 2443 - protein, 5 aa, SARS-CoV Virus
LIVIN

SEQ ID NO: 2444 - protein, 30 aa, SARS-CoV Virus
STHSVNNFSRTTATSSKEHVWTYCFHKSAH

SEQ ID NO: 2445 - protein, 6 aa, SARS-CoV Virus
IKIFWF

SEQ ID NO: 2446 - protein, 11 aa, SARS-CoV Virus
CAFSQQCAGGW

SEQ ID NO: 2447 - protein, 52 aa, SARS-CoV Virus
LSRIANIDVVFCTKSSIDNTQVIISSHRDFIKDYNVSSCFWQCIYSAENILF

SEQ ID NO: 2448 - protein, 27 aa, SARS-CoV Virus
IHFEFIKTLYARTRRYDSTTFIYGQIF

SEQ ID NO: 2449 - protein, 4 aa, SARS-CoV Virus
CLFT

SEQ ID NO: 2450 - protein, 57 aa, SARS-CoV Virus
GINSCMRACRIHYASRWVIESKSDGKMTLTSTRWSLECRVLLHADLLIICNIARKLI

SEQ ID NO: 2451 - protein, 18 aa, SARS-CoV Virus
DVECWVQASNSHIVLLWH

SEQ ID NO: 2452 - protein, 73 aa, SARS-CoV Virus
SRCTKWHYSVRCQHKVITNIQLVCRSTSVHNSITIVTFFKGVLSNLYFTIFSYTVTSKDIVSVQWWSRFSNLP

SEQ ID NO: 2453 - protein, 17 aa, SARS-CoV Virus
KMQFSVREYFAYSGNTI

SEQ ID NO: 2454 - protein, 55 aa, SARS-CoV Virus
QLKCFLSGFERFCCEKLESLSTSVGKYVIASISPITCCYRIEVSDIVTAYTCVFV

SEQ ID NO: 2455 - protein, 8 aa, SARS-CoV Virus
TKNLTIST

SEQ ID NO: 2456 - protein, 8 aa, SARS-CoV Virus
WKTNGRLM

SEQ ID NO: 2457 - protein, 8 aa, SARS-CoV Virus
LAIIAHTS

SEQ ID NO: 2458 - protein, 23 aa, SARS-CoV Virus
IQLCHISDITTWGIANIGINRQH

SEQ ID NO: 2459 - protein, 10 aa, SARS-CoV Virus
NDMVIAALAT

SEQ ID NO: 2460 - protein, 11 aa, SARS-CoV Virus
EWSPNTGTATK

SEQ ID NO: 2461 - protein, 28 aa, SARS-CoV Virus
IAQYTSTYSLQDCMWCVHSLIKLRFPVP

SEQ ID NO: 2462 - protein, 5 aa, SARS-CoV Virus
GVIIS

SEQ ID NO: 2463 - protein, 15 aa, SARS-CoV Virus
HYGIHVQHVASKLIM

SEQ ID NO: 2464 - protein, 5 aa, SARS-CoV Virus
LSNVL

SEQ ID NO: 2465 - protein, 23 aa, SARS-CoV Virus
IQVKDISILLIRMFCKWVSINSQ

SEQ ID NO: 2466 - protein, 22 aa, SARS-CoV Virus
HEPFNHKCTICFDNIIDKTACA

SEQ ID NO: 2467 - protein, 15 aa, SARS-CoV Virus
WIWVRQVHVIISLFN

SEQ ID NO: 2468 - protein, 4 aa, SARS-CoV Virus
HCML

SEQ ID NO: 2469 - protein, 38 aa, SARS-CoV Virus
AKFVRSFSKVSLSPTFCLRHEHIILIIKNCLKVLNASY

SEQ ID NO: 2470 - protein, 51 aa, SARS-CoV Virus
TLSRIVTVIAHNGIIRKNHHGEMFTQVSVKLIHEFMINIPISIETLIEPVL

SEQ ID NO: 2471 - protein, 13 aa, SARS-CoV Virus
IADILVSYLITIS

SEQ ID NO: 2472 - protein, 27 aa, SARS-CoV Virus
KKCIYIGCNSLTNVKDTISISSCSITG

SEQ ID NO: 2473 - protein, 7 aa, SARS-CoV Virus
CSTWFNI

SEQ ID NO: 2474 - protein, 8 aa, SARS-CoV Virus
AATHDHLT

SEQ ID NO: 2475 - protein, 7 aa, SARS-CoV Virus
YLRTLVS

SEQ ID NO: 2476 - protein, 5 aa, SARS-CoV Virus
PVETV

SEQ ID NO: 2477 - protein, 45 aa, SARS-CoV Virus
VTASVMFASKNKRGHYPKHVRHGSVTFWIIPTHKVWSFYITVNSF

SEQ ID NO: 2478 - protein, 23 aa, SARS-CoV Virus
HIMPATVKLACSNYHSSSSSGGY

SEQ ID NO: 2479 - protein, 56 aa, SARS-CoV Virus
FLMKLSICHSTTDRDTSYGASSILCTNGILKIHLSYSRDDITLSIREKCILILITH

SEQ ID NO: 2480 - protein, 16 aa, SARS-CoV Virus
VIIKSSLTPFIKWETS

SEQ ID NO: 2481 - protein, 30 aa, SARS-CoV Virus
FIQIVNDYLVGINTATIVTIKVFINNFNYE

SEQ ID NO: 2482 - protein, 32 aa, SARS-CoV Virus
ELSDITHCWQIITIIVIITDSSVAILSKEEVF

SEQ ID NO: 2483 - protein, 35 aa, SARS-CoV Virus
FNRTSFLKETFRHSKVIKVFIKITGFDSLKSNIVC

SEQ ID NO: 2484 - protein, 7 aa, SARS-CoV Virus
KACSAFI

SEQ ID NO: 2485 - protein, 14 aa, SARS-CoV Virus
IARSCMHSWISSIH

SEQ ID NO: 2486 - protein, 10 aa, SARS-CoV Virus
KFLETETRAM

SEQ ID NO: 2487 - protein, 9 aa, SARS-CoV Virus
VYILIMYDS

SEQ ID NO: 2488 - protein, 7 aa, SARS-CoV Virus
LTKMVSS

SEQ ID NO: 2489 - protein, 13 aa, SARS-CoV Virus
NNKRNTIYKYFSY

SEQ ID NO: 2490 - protein, 12 aa, SARS-CoV Virus
WSKTCRWKHSRK

SEQ ID NO: 2491 - protein, 76 aa, SARS-CoV Virus
HIKVCTMKDTPIIQTVNTIGMVCLVPIFKITVEETKSLFRKIIFQQIPLNKWFCEISIHMGLSSQCPSQSEDGHQQ

SEQ ID NO: 2492 - protein, 28 aa, SARS-CoV Virus
IHNRNSAAWCYLYEITEIVPVPIKILII

SEQ ID NO: 2493 - protein, 19 aa, SARS-CoV Virus
CQYAYNACITHSIAELYSL

SEQ ID NO: 2494 - protein, 6 aa, SARS-CoV Virus
LAYTLT

SEQ ID NO: 2495 - protein, 5 aa, SARS-CoV Virus
VSIYA

SEQ ID NO: 2496 - protein, 29 aa, SARS-CoV Virus
DVRILYEVIPILLIEIIIITAIVCDEYFF

SEQ ID NO: 2497 - protein, 10 aa, SARS-CoV Virus
CITITLIKMT

SEQ ID NO: 2498 - protein, 7 aa, SARS-CoV Virus
ISHCVFS

SEQ ID NO: 2499 - protein, 48 aa, SARS-CoV Virus
YMWYHVTIYSKLEKVMDSNRWTIFNQVINSLFMLVVRHSMPLNYKVRV

SEQ ID NO: 2500 - protein, 15 aa, SARS-CoV Virus
IAFLILLLEATAISF

SEQ ID NO: 2501 - protein, 61 aa, SARS-CoV Virus
ELCKTSTFFVVNIKSPVDDISTSACAARCKTGCTYTANPFKNVDASADCIKGSRSWSQLQP

SEQ ID NO: 2502 - protein, 95 aa, SARS-CoV Virus
PFHIPQTVQTVFLSVKPTGSLAQVVGIWTYLPFKSQNPLGFGWSMWHLQYRQHEAPPKDSWSMLASGVTVIACPVPVCVHNIFTQLVIGCPPLAR

SEQ ID NO: 2503 - protein, 29 aa, SARS-CoV Virus
SLYALAGSTAKAQKESTVELAGTSVAFPA

SEQ ID NO: 2504 - protein, 46 aa, SARS-CoV Virus
RRTVAAKLPSTIPLFRLFKPLMKYKYFTLGPFGVSVTNLQGGSSSV

SEQ ID NO: 2505 - protein, 33 aa, SARS-CoV Virus
IVPVPSLLGNLAHLRSWWSDSNASTNLPPFELL

SEQ ID NO: 2506 - protein, 60 aa, SARS-CoV Virus
ASALSSVQAVCVVPAAQDICRSATGLSSLFCSLTAELALRAVTIRGQAKFGELSMLISLS

SEQ ID NO: 2507 - protein, 29 aa, SARS-CoV Virus
TILLSASTTCWISQSADAYVKVLPSQVFL

SEQ ID NO: 2508 - protein, 69 aa, SARS-CoV Virus
SGTTTMSLAAVVNGMMLSGTQPSRALLIMLLSASLSSFLSIVKSIVCIALVTFALLSSDLACLYIWVIA

SEQ ID NO: 2509 - protein, 42 aa, SARS-CoV Virus
SAIFSNLRCMAASRSNSDLATFKDFFNFLRTTSESPLATACS

SEQ ID NO: 2510 - protein, 6 aa, SARS-CoV Virus
ASWAVA

SEQ ID NO: 2511 - protein, 14 aa, SARS-CoV Virus
AAYDGKELNSEAIA

SEQ ID NO: 2512 - protein, 64 aa, SARS-CoV Virus
RVARLSSISSHNLLMSTAPCMDSKTDKRETIFSKASVVSFARRISLWSCTHCAHNLEDDSTLSC

SEQ ID NO: 2513 - protein, 63 aa, SARS-CoV Virus
RTESSTTDVHFTSDILDCTVATLIHGLPPIPNNLMLSLKASILLLGGKSPWEFIYLNSCVETK

SEQ ID NO: 2514 - protein, 7 aa, SARS-CoV Virus
TPRVSLK

SEQ ID NO: 2515 - protein, 9 aa, SARS-CoV Virus
RLSKQKRPK

SEQ ID NO: 2516 - protein, 4 aa, SARS-CoV Virus
QQQQ

SEQ ID NO: 2517 - protein, 4 aa, SARS-CoV Virus
PKKQ

SEQ ID NO: 2518 - protein, 16 aa, SARS-CoV Virus
TSMIHCKVLPVINNNG

SEQ ID NO: 2519 - protein, 21 aa, SARS-CoV Virus
YSTHTNTIALAKNMIVVTTPE

SEQ ID NO: 2520 - protein, 14 aa, SARS-CoV Virus
LEVTEITKAHMEIA

SEQ ID NO: 2521 - protein, 5 aa, SARS-CoV Virus
SKALP

SEQ ID NO: 2522 - protein, 17 aa, SARS-CoV Virus
TSVMTFISVQTRLAASS

SEQ ID NO: 2523 - protein, 23 aa, SARS-CoV Virus
TVRAVMRISKTKAEAYITQSLSL

SEQ ID NO: 2524 - protein, 22 aa, SARS-CoV Virus
PDKLVSANSSHVMIRITQLAGM

SEQ ID NO: 2525 - protein, 4 aa, SARS-CoV Virus
TILK

SEQ ID NO: 2526 - protein, 41 aa, SARS-CoV Virus
ATVAREGNRNKHKNACLCLTSSIAHAAIAIIPRVNGKKAFS

SEQ ID NO: 2527 - protein, 10 aa, SARS-CoV Virus
TKKNSDHCVL

SEQ ID NO: 2528 - protein, 14 aa, SARS-CoV Virus
TRINSDVKKVKSIQ

SEQ ID NO: 2529 - protein, 60 aa, SARS-CoV Virus
VPLTIFLNLPWKVTPEHCLTTSNGVNSSSKIVLPRIVRPFIPFCSSSFKAAHISKTAIPV

SEQ ID NO: 2530 - protein, 9 aa, SARS-CoV Virus
AERGPNMST

SEQ ID NO: 2531 - protein, 6 aa, SARS-CoV Virus
SCVKGS

SEQ ID NO: 2532 - protein, 56 aa, SARS-CoV Virus
LYFIATRLKSFKVVVNLLRNHLSPLITAAYSHAKTFNVMVVSVPAACAVCLSTNGP

SEQ ID NO: 2533 - protein, 17 aa, SARS-CoV Virus
NLPSKSVPACTPVGSSI

SEQ ID NO: 2534 - protein, 6 aa, SARS-CoV Virus
QKDTQS

SEQ ID NO: 2535 - protein, 19 aa, SARS-CoV Virus
SMLKPTLPHDPLRKEPLMV

SEQ ID NO: 2536 - protein, 6 aa, SARS-CoV Virus
LGLMAH

SEQ ID NO: 2537 - protein, 7 aa, SARS-CoV Virus
TPDGEPL

SEQ ID NO: 2538 - protein, 7 aa, SARS-CoV Virus
HARTENV

SEQ ID NO: 2539 - protein, 35 aa, SARS-CoV Virus
PGWIRTNLYLGVLGLEVSTLSLSRQFCIEWPITRS

SEQ ID NO: 2540 - protein, 4 aa, SARS-CoV Virus
TLPA

SEQ ID NO: 2541 - protein, 14 aa, SARS-CoV Virus
TRKLWLDLRMSRSS

SEQ ID NO: 2542 - protein, 66 aa, SARS-CoV Virus
LGLSMSSAVQMTCLGQYTVSSNHNPLRVVVPQVTCTMHPSTLPDGNAIFLKPLCRTAEVIDVCGGW

SEQ ID NO: 2543 - protein, 23 aa, SARS-CoV Virus
RTSAPELLKSFRAFAKWQQAASR

SEQ ID NO: 2544 - protein, 65 aa, SARS-CoV Virus
LVVSKAPLKYLYLLYRARYLLYCVSGNSVSLRNFRYISLLSKKVHKAASSKVLNVTPLNMTLFLR

SEQ ID NO: 2545 - protein, 15 aa, SARS-CoV Virus
LLKNQWQCFREIQNT

SEQ ID NO: 2546 - protein, 16 aa, SARS-CoV Virus
IAVIQKGTIGENMANH

SEQ ID NO: 2547 - protein, 9 aa, SARS-CoV Virus
AKNETSLVK

SEQ ID NO: 2548 - protein, 5 aa, SARS-CoV Virus
NVKYK

SEQ ID NO: 2549 - protein, 6 aa, SARS-CoV Virus
TPGRKL

SEQ ID NO: 2550 - protein, 34 aa, SARS-CoV Virus
AGTRQSIVKDIKNKSALAATTWLYSPKTRLNFIK

SEQ ID NO: 2551 - protein, 50 aa, SARS-CoV Virus
AAQVTNMAIIPPATTEADTSKAPTGCTRGVKMLAMRFIASTPQKTPDRAL

SEQ ID NO: 2552 - protein, 42 aa, SARS-CoV Virus
CSLLRTHLPLVDRQIPTSDLSHVPCLQYSASKVVTTLTEPSR

SEQ ID NO: 2553 - protein, 13 aa, SARS-CoV Virus
VLGNCMMEPSIST

SEQ ID NO: 2554 - protein, 8 aa, SARS-CoV Virus
RVSGRSSL

SEQ ID NO: 2555 - protein, 10 aa, SARS-CoV Virus
EIEPSSKLVS

SEQ ID NO: 2556 - protein, 36 aa, SARS-CoV Virus
QYGTGLPIASLKIVHSAARTQAEVAKSLYSMSLEGV

SEQ ID NO: 2557 - protein, 83 aa, SARS-CoV Virus
QMLPTALKTRGRKCKKSPLIALSTVPGKPGTMKPISLVMIAATTGQLLSFLYEPPRWLNHASKPACLFAKQSSVEMMSRVTPS

SEQ ID NO: 2558 - protein, 6 aa, SARS-CoV Virus
PMISFV

SEQ ID NO: 2559 - protein, 13 aa, SARS-CoV Virus
PSWIDNVCTGITI

SEQ ID NO: 2560 - protein, 69 aa, SARS-CoV Virus
QTNAARTHNNVALSISLKQVLTILPPLSEILVVMTLTTCLVVAQVSVKGMLFFLAAVRICLRSCSDKDM

SEQ ID NO: 2561 - protein, 10 aa, SARS-CoV Virus
SFTFQMSETL

SEQ ID NO: 2562 - protein, 29 aa, SARS-CoV Virus
LFATWALICLALQSIHAPRSLGVMFSTLL

SEQ ID NO: 2563 - protein, 16 aa, SARS-CoV Virus
VSMKLLQLSPVTSKSE

SEQ ID NO: 2564 - protein, 42 aa, SARS-CoV Virus
CESLRHSITSFVSTSVSTTPCRAADTNVERTPSKATPFANSL

SEQ ID NO: 2565 - protein, 22 aa, SARS-CoV Virus
AVATSALSFSIGTLKVAEKVST

SEQ ID NO: 2566 - protein, 30 aa, SARS-CoV Virus
ASNILTETSVLSPTFDTRAWSSNRIGWHIS

SEQ ID NO: 2567 - protein, 47 aa, SARS-CoV Virus
YTEADLEADSSHLDLPSKTMTLIGSEPLVLLALKLSKLTKWESGCLS

SEQ ID NO: 2568 - protein, 5 aa, SARS-CoV Virus
PALSK

SEQ ID NO: 2569 - protein, 53 aa, SARS-CoV Virus
SAPFFTATLSTIYDDWSVGLIGLLNWSDKSRATSSLMNVLPVQNVSQLRQFQL

SEQ ID NO: 2570 - protein, 10 aa, SARS-CoV Virus
VLQKPRPPFA

SEQ ID NO: 2571 - protein, 21 aa, SARS-CoV Virus
KDLFMPLTIVVHSTRVARLRL

SEQ ID NO: 2572 - protein, 13 aa, SARS-CoV Virus
HIMQVEEVQPSMI

SEQ ID NO: 2573 - protein, 4 aa, SARS-CoV Virus
LFHM

SEQ ID NO: 2574 - protein, 33 aa, SARS-CoV Virus
KEAKKMYILTIAETGAICTILMINHMSQELLMK

SEQ ID NO: 2575 - protein, 13 aa, SARS-CoV Virus
PKNTCIIAERPNK

SEQ ID NO: 2576 - protein, 30 aa, SARS-CoV Virus
KNFVNNIYAKTHSAARPKIVKSSLYDEIVT

SEQ ID NO: 2577 - protein, 6 aa, SARS-CoV Virus
MVSRAG

SEQ ID NO: 2578 - protein, 38 aa, SARS-CoV Virus
ESRESNPLKQMLQGKEPSQKSIVVTLDELRYNSLTPLQ

SEQ ID NO: 2579 - protein, 44 aa, SARS-CoV Virus
EGAPKLDKSTPKAAVTQIREPKQILNNNSHIAIVNNLENLGDFT

SEQ ID NO: 2580 - protein, 45 aa, SARS-CoV Virus
LMPASKHNLATLLTLFLAIVVGSEALILELVLLVKVHNWNNNVNT

SEQ ID NO: 2581 - protein, 26 aa, SARS-CoV Virus
LLNTRCANLLAQFDVVIAACPKNGLT

SEQ ID NO: 2582 - protein, 15 aa, SARS-CoV Virus
AKILLQGTLLIAAIP

SEQ ID NO: 2583 - protein, 25 aa, SARS-CoV Virus
VAIVFKPKASESSLGFLMVMLVFST

SEQ ID NO: 2584 - protein, 6 aa, SARS-CoV Virus
AAIRSS

SEQ ID NO: 2585 - protein, 47 aa, SARS-CoV Virus
PNSCVTLTPSSDGLSMTLPTTSVVFTSHSMTSFCMVGFSTTSSEVGC

SEQ ID NO: 2586 - protein, 68 aa, SARS-CoV Virus
LSQARLSIPCVSSTARTSNEFEVSTGFVLQRQRKHQVFGLNVVLVVAWLMCQTIGLCSNLAPFLKLAE

SEQ ID NO: 2587 - protein, 28 aa, SARS-CoV Virus
SIATTSPFKSGKNVTDSSREAGFVKPVI

SEQ ID NO: 2588 - protein, 24 aa, SARS-CoV Virus
FKSSANFVLEHVSLKLSKLAFGNG

SEQ ID NO: 2589 - protein, 10 aa, SARS-CoV Virus
VGTRSIGCSV

SEQ ID NO: 2590 - protein, 5 aa, SARS-CoV Virus
ALSFL

SEQ ID NO: 2591 - protein, 10 aa, SARS-CoV Virus
YPSNFGSISV

SEQ ID NO: 2592 - protein, 15 aa, SARS-CoV Virus
VTPSSLYDTGLMVVV

SEQ ID NO: 2593 - protein, 4 aa, SARS-CoV Virus
DVSL

SEQ ID NO: 2594 - protein, 15 aa, SARS-CoV Virus
KTSVTGPLYSDIFVR

SEQ ID NO: 2595 - protein, 5 aa, SARS-CoV Virus
APSIR

SEQ ID NO: 2596 - protein, 7 aa, SARS-CoV Virus
RVSLAVI

SEQ ID NO: 2597 - protein, 54 aa, SARS-CoV Virus
LPVYSFAHKNVPCCNLYSAGGADIITKEDSCCTRYCVASRPHTHGMETPVLRLS

SEQ ID NO: 2598 - protein, 18 aa, SARS-CoV Virus
DRVPIYITASTPVKVVVF

SEQ ID NO: 2599 - protein, 39 aa, SARS-CoV Virus
PQCLHTTLRTRFADSKLACCRRWVIVSLTSPSSPTVLLL

SEQ ID NO: 2600 - protein, 16 aa, SARS-CoV Virus
ASMSAQKLAASPARAL

SEQ ID NO: 2601 - protein, 11 aa, SARS-CoV Virus
SAGALNLTSSC

SEQ ID NO: 2602 - protein, 8 aa, SARS-CoV Virus
SANKTLDK

SEQ ID NO: 2603 - protein, 14 aa, SARS-CoV Virus
QLLSAHLIEVKPPT

SEQ ID NO: 2604 - protein, 24 aa, SARS-CoV Virus
GNFHFFVWFKADMYLPRKLSSRVW

SEQ ID NO: 2605 - protein, 21 aa, SARS-CoV Virus
YSKASLRSVSSLGSTKKVLPS

SEQ ID NO: 2606 - protein, 64 aa, SARS-CoV Virus
GLIFVTSAPSKYVGPNCCPYVIDISTSCVWRLVLSTVVNTFIVLTSRRDKRLFSLSSERTSPSR

SEQ ID NO: 2607 - protein, 29 aa, SARS-CoV Virus
NSTGLSRVWYTILSPRLRNSTPNSVRCPE

SEQ ID NO: 2608 - protein, 4 aa, SARS-CoV Virus
DQSL

SEQ ID NO: 2609 - protein, 58 aa, SARS-CoV Virus
EPAKETVSTKCSSDVFDDEVRYPLYVVTASGDDTDTTAGALRERIQRAASSRLKPCVT

SEQ ID NO: 2610 - protein, 26 aa, SARS-CoV Virus
PIGIVTSGSFREFSFVIIEATGSLLV

SEQ ID NO: 2611 - protein, 6 aa, SARS-CoV Virus
KKNRTP

SEQ ID NO: 2612 - protein, 5 aa, SARS-CoV Virus
STMPS

SEQ ID NO: 2613 - protein, 30 aa, SARS-CoV Virus
ILIPLYLRWMVAIMALTSMHIGINFLVSSA

SEQ ID NO: 2614 - protein, 26 aa, SARS-CoV Virus
ASISLKFQDTVPRISSLALGASEGST

SEQ ID NO: 2615 - protein, 16 aa, SARS-CoV Virus
NADLHFLRAVLASSSV

SEQ ID NO: 2616 - protein, 51 aa, SARS-CoV Virus
PAHPCPGYVVIYSSTGTFFKALESISVVPPAFLEGITTQVISPLVITSPTM

SEQ ID NO: 2617 - protein, 16 aa, SARS-CoV Virus
GASFSRKDISSPLSMF

SEQ ID NO: 2618 - protein, 71 aa, SARS-CoV Virus
SLPLISANKSNLLVRNLVSSSVVVTSSMQALIFGFTSTGFCTTDFSSVLESSVFGGSSCLGASTLGFRLSR

SEQ ID NO: 2619 - protein, 6 aa, SARS-CoV Virus
SMTTCS

SEQ ID NO: 2620 - protein, 8 aa, SARS-CoV Virus
RALSLTAI

SEQ ID NO: 2621 - protein, 13 aa, SARS-CoV Virus
TCVRTVCTHTCKD

SEQ ID NO: 2622 - protein, 69 aa, SARS-CoV Virus
SGLAPNMPADNNGASKMSCELKFSYAALRSWMSSPAFRLGPTTCRHFLARLCPESKQDPPTVRGPFSLM

SEQ ID NO: 2623 - protein, 58 aa, SARS-CoV Virus
SSLSFCMAPLVALLSAPATPPPCFRCMLAAFTITIGLALCASLTMSTHLMATLSVSFK

SEQ ID NO: 2624 - protein, 46 aa, SARS-CoV Virus
LTGSSGVGSGSGSISDCSVVSSSQSSSSSSSTRTVSAEAPNSRGRP

SEQ ID NO: 2625 - protein, 30 aa, SARS-CoV Virus
SSSVPYSCSQVSSISSSSHSASSSSSSSGG

SEQ ID NO: 2626 - protein, 18 aa, SARS-CoV Virus
KEQYIRDEKFSSPASSNK

SEQ ID NO: 2627 - protein, 45 aa, SARS-CoV Virus
NVATLHSSRSIPMLVRRSETGCKVFTTASATTHANSVTSVPDSTV

SEQ ID NO: 2628 - protein, 23 aa, SARS-CoV Virus
TEHFSLSTLSTRSSSSNVILTFL

SEQ ID NO: 2629 - protein, 115 aa, SARS-CoV Virus
TSQTVSSPKVTPLIGAPPFKRKTLFVASKPGDNAQYCSLSLISKSMRPFTQTGVPTIAPFVKLSTGVSSASSSPFLRTTSSEVSTVSCESPSRKVTSFGALRGMSSCSCSLPRIH

SEQ ID NO: 2630 - protein, 4 aa, SARS-CoV Virus
SPLL

SEQ ID NO: 2631 - protein, 19 aa, SARS-CoV Virus
AMKTSPKLSDRNFAPAIVT

SEQ ID NO: 2632 - protein, 28 aa, SARS-CoV Virus
SMHISSALLTTSMKHFTQSLMLSEATCI

SEQ ID NO: 2633 - protein, 51 aa, SARS-CoV Virus
PLTMSKTPVMRNLRISQASLRNSTPALSFASIHSKIGLSFSTVVPKRLDNH

SEQ ID NO: 2634 - protein, 24 aa, SARS-CoV Virus
EVCCTRPPVTYAIIMTLLVSRSEV

SEQ ID NO: 2635 - protein, 76 aa, SARS-CoV Virus
TMASTRRNDCSEIPSSMVTAALCKSGIEWFAASSVRAKIDLITPAACEGKPHSGVKTDLCCPMFQAPFTGFPLVTL

SEQ ID NO: 2636 - protein, 12 aa, SARS-CoV Virus
LPQDSTMVLKDL

SEQ ID NO: 2637 - protein, 27 aa, SARS-CoV Virus
SRLFIVSIKALVEAEKDAKMMATSSFK

SEQ ID NO: 2638 - protein, 45 aa, SARS-CoV Virus
KSPTMLMLTRSRLSISRRSSFKVSTLSPVMPVWPEPISALARGTQ

SEQ ID NO: 2639 - protein, 4 aa, SARS-CoV Virus
ARLL

SEQ ID NO: 2640 - protein, 24 aa, SARS-CoV Virus
ANTQPPKHLVLPPLRSRVSMFEWL

SEQ ID NO: 2641 - protein, 12 aa, SARS-CoV Virus
SATLCSGPISGS

SEQ ID NO: 2642 - protein, 48 aa, SARS-CoV Virus
QAGHGIFTTALVGRYPHVVGPSITKFSVPQCSQVAFRKSHVCHETSSQ

SEQ ID NO: 2643 - protein, 39 aa, SARS-CoV Virus
LHFIKVDKCILLHSCGDATGYTERIRPMKPSVFFFSTRG

SEQ ID NO: 2644 - protein, 35 aa, SARS-CoV Virus
MTLTFELRGNTNFGHSPLKVSNFLALLISKGVWCS

SEQ ID NO: 2645 - protein, 19 aa, SARS-CoV Virus
LLSERSVNQAISCSWSRQQ

SEQ ID NO: 2646 - protein, 7 aa, SARS-CoV Virus
TPLFDSM

SEQ ID NO: 2647 - protein, 35 aa, SARS-CoV Virus
SSCSERVHIDLPARARKSLMQSRGYPSGPQKLLST

SEQ ID NO: 2648 - protein, 27 aa, SARS-CoV Virus
RVTAPPLSSRVSSRSAPLPCLVFQFCS

SEQ ID NO: 2649 - protein, 13 aa, SARS-CoV Virus
SSMGSVPSSSPKS

SEQ ID NO: 2650 - protein, 6 aa, SARS-CoV Virus
DFRSMP

SEQ ID NO: 2651 - protein, 37 aa, SARS-CoV Virus
PPAPLLPFLRRRTLRYAIGVSPTCGTSTPSVIPLRPY

SEQ ID NO: 2652 - protein, 14 aa, SARS-CoV Virus
MPSISATSSTTLWP

SEQ ID NO: 2653 - protein, 12 aa, SARS-CoV Virus
LVLKASERLMNT

SEQ ID NO: 2654 - protein, 45 aa, SARS-CoV Virus
GCSSWGSTPFSSSTRPQVPFLRCSRASDRASSTESPKPRTSTSLT

SEQ ID NO: 2655 - protein, 69 aa, SARS-CoV Virus
RTGKLSWTCVFSLTPRTRLSILPFGHTRTKPRYADDRLQHGRNRKQSAEEGRVTRFLSTTVKFIIVYTA

SEQ ID NO: 2656 - protein, 14 aa, SARS-CoV Virus
ACSRATATQILKFV

SEQ ID NO: 2657 - protein, 16 aa, SARS-CoV Virus
RTDLQEIEVGWLFLGR

SEQ ID NO: 2658 - DNA, 29742 bp, SARS-CoV Virus; identical to SEQ ID NO: 1801
  CDS (3)..(29741)

SEQ ID NO: 2659 - protein, 26 aa, SARS-CoV Virus
FFFFCHSPKKLLKSHGDSTTKINFTH

SEQ ID NO: 2660 - protein, 4 aa, SARS-CoV Virus
GSSI

SEQ ID NO: 2661 - protein, 29 aa, SARS-CoV Virus
AALPSIIHCTLDRTPRGLDENVVALSSPP

SEQ ID NO: 2662 - protein, 21 aa, SARS-CoV Virus
CYTLIKDCYVRLKLTKPTCAV

SEQ ID NO: 2663 - protein, 22 aa, SARS-CoV Virus
LREFILHKSRLCIVNGIAKTFT

SEQ ID NO: 2664 - protein, 8 aa, SARS-CoV Virus
PICLVWSS

SEQ ID NO: 2665 - protein, 55 aa, SARS-CoV Virus
VFMPELNQQKLHSWNFEVVWRNHPCQPQEEESQWAASFVSAAKAELHQSFSFCPF

SEQ ID NO: 2666 - protein, 17 aa, SARS-CoV Virus
ALLVGMFCMRQCACSAV

SEQ ID NO: 2667 - protein, 8 aa, SARS-CoV Virus
IVDLCHPI

SEQ ID NO: 2668 - protein, 12 aa, SARS-CoV Virus
WLHDKSAMFPKV

SEQ ID NO: 2669 - protein, 31 aa, SARS-CoV Virus
LPCQCVTFQRMQRHLEQIVQFAANVCNQFLV

SEQ ID NO: 2670 - protein, 21 aa, SARS-CoV Virus
LGLGPRNFLGFVLDHVSQMLE

SEQ ID NO: 2671 - protein, 14 aa, SARS-CoV Virus
RCTVLWQYVFGEAF

SEQ ID NO: 2672 - protein, 7 aa, SARS-CoV Virus
MPQQQIS

SEQ ID NO: 2673 - protein, 34 aa, SARS-CoV Virus
QFGLVVVGLYQKLCSQAGSICLAAIARGQFHHLR

SEQ ID NO: 2674 - protein, 59 aa, SARS-CoV Virus
PFEQENFPYCCQELNFLNYRDYVMRSEKRLDCRLCFPLRRSLLAMLFLEEVVARWQHCY

SEQ ID NO: 2675 - protein, 25 aa, SARS-CoV Virus
DCGCQCGLWVYSRLPQLQPIRCLLC

SEQ ID NO: 2676 - protein, 20 aa, SARS-CoV Virus
RRREVKLLGQFLGNRSTIWG

SEQ ID NO: 2677 - protein, 13 aa, SARS-CoV Virus
ALSFCRHHHELVG

SEQ ID NO: 2678 - protein, 15 aa, SARS-CoV Virus
LFGSSQFGHLDHYWC

SEQ ID NO: 2679 - protein, 9 aa, SARS-CoV Virus
LERPGLEGI

SEQ ID NO: 2680 - protein, 7 aa, SARS-CoV Virus
VPPCHAE

SEQ ID NO: 2681 - protein, 37 aa, SARS-CoV Virus
TKTQYYWVNLGVGAVLALPHCVLHSGYCQLNLWVHQM

SEQ ID NO: 2682 - protein, 16 aa, SARS-CoV Virus
CGGHYVGLIGVHYQTF

SEQ ID NO: 2683 - protein, 17 aa, SARS-CoV Virus
FVRLFKTTSTSLNAAVW

SEQ ID NO: 2684 - protein, 14 aa, SARS-CoV Virus
RYQHLAISAPPAGS

SEQ ID NO: 2685 - protein, 10 aa, SARS-CoV Virus
QLIVTLGVHV

SEQ ID NO: 2686 - protein, 6 aa, SARS-CoV Virus
TIVCHL

SEQ ID NO: 2687 - protein, 14 aa, SARS-CoV Virus
KGKTFPRAQSQAVL

SEQ ID NO: 2688 - protein, 31 aa, SARS-CoV Virus
VLPLVLYLTRIFKHMRFIRCTALYYSAYATA

SEQ ID NO: 2689 - protein, 21 aa, SARS-CoV Virus
RNTSQNNEKFHVRLDFGTRFF

SEQ ID NO: 2690 - protein, 5 aa, SARS-CoV Virus
ILDFE

SEQ ID NO: 2691 - protein, 8 aa, SARS-CoV Virus
KPKYNKHY

SEQ ID NO: 2692 - protein, 7 aa, SARS-CoV Virus
KAQIEVN

SEQ ID NO: 2693 - protein, 29 aa, SARS-CoV Virus
SELIHSVFLLMVKQSIKNTRAATMRKSGE

SEQ ID NO: 2694 - protein, 17 aa, SARS-CoV Virus
TSSCLMKSFGETDLARS

SEQ ID NO: 2695 - protein, 27 aa, SARS-CoV Virus
VCRVPSAQAKAKCVLVQVSANLLSARG

SEQ ID NO: 2696 - protein, 25 aa, SARS-CoV Virus
NGELPSYVPDGQGSFSSTVVPLTHS

SEQ ID NO: 2697 - protein, 24 aa, SARS-CoV Virus
YSSQDVNTINVRKRIIFMFVLWII

SEQ ID NO: 2698 - protein, 7 aa, SARS-CoV Virus
LHRFFII

SEQ ID NO: 2699 - protein, 7 aa, SARS-CoV Virus
LRIILLS

SEQ ID NO: 2700 - protein, 4 aa, SARS-CoV Virus
LSHY

SEQ ID NO: 2701 - protein, 89 aa, SARS-CoV Virus
TYYNVKIPNSNPESPHNDNQYLCYCNLEVNKMKHLLSLTVLAKQYCRCYRRGLYLIYSFQYGSGCMQQNLNQCLHAATLLICNKKAFVM

SEQ ID NO: 2702 - protein, 6 aa, SARS-CoV Virus
SLLAGP

SEQ ID NO: 2703 - protein, 16 aa, SARS-CoV Virus
CHSALGSVRPFASDHE

SEQ ID NO: 2704 - protein, 4 aa, SARS-CoV Virus
SQHQ

SEQ ID NO: 2705 - protein, 5 aa, SARS-CoV Virus
QVHFP

SEQ ID NO: 2706 - protein, 12 aa, SARS-CoV Virus
AVWSQLSPGEAH

SEQ ID NO: 2707 - protein, 7 aa, SARS-CoV Virus
EECLFLG

SEQ ID NO: 2708 - protein, 11 aa, SARS-CoV Virus
MTTLSGYEQTA

SEQ ID NO: 2709 - protein, 6 aa, SARS-CoV Virus
RKQRSS

SEQ ID NO: 2710 - protein, 19 aa, SARS-CoV Virus
ATSSLQYKPLQSQSRQSPN

SEQ ID NO: 2711 - protein, 32 aa, SARS-CoV Virus
FCRQQQAQNKQVLLATRARGKQALLCTKTCSD

SEQ ID NO: 2712 - protein, 7 aa, SARS-CoV Virus
NRQIVVT

SEQ ID NO: 2713 - protein, 18 aa, SARS-CoV Virus
SRLGIGNLLLGSIVPGVV

SEQ ID NO: 2714 - protein, 4 aa, SARS-CoV Virus
APQR

SEQ ID NO: 2715 - protein, 5 aa, SARS-CoV Virus
YRCLP

SEQ ID NO: 2716 - protein, 8 aa, SARS-CoV Virus
AMLKFQTE

SEQ ID NO: 2717 - protein, 29 aa, SARS-CoV Virus
LVRLDQKIRNSFRRVQIFNTRVDVNRWFY

SEQ ID NO: 2718 - protein, 19 aa, SARS-CoV Virus
THVNNIAAVRTQSKRSKDG

SEQ ID NO: 2719 - protein, 15 aa, SARS-CoV Virus
QEYHESKKKKYAINY

SEQ ID NO: 2720 - protein, 8 aa, SARS-CoV Virus
RTCFFRNE

SEQ ID NO: 2721 - protein, 33 aa, SARS-CoV Virus
VHKFVLTFLCLQRHASSRRRLIINWIHCWISNS

SEQ ID NO: 2722 - protein, 56 aa, SARS-CoV Virus
RAVDCVYLHIRWVFNKLVKDEECSIFNTSVCSNLCRLKLVVNFGEIAMYNDIVFNT

SEQ ID NO: 2723 - protein, 18 aa, SARS-CoV Virus
VPILRITTNLVVFFEFWC

SEQ ID NO: 2724 - protein, 36 aa, SARS-CoV Virus
NAVTFSNDNCICDTVIWYTVVIVMCVPANKVVGIIK

SEQ ID NO: 2725 - protein, 23 aa, SARS-CoV Virus
WVLGFALPTKPTSHNNSTCVDAL

SEQ ID NO: 2726 - protein, 22 aa, SARS-CoV Virus
KIYQGIEVQKLRLLTCSDKQKM

SEQ ID NO: 2727 - protein, 5 aa, SARS-CoV Virus
IDGNK

SEQ ID NO: 2728 - protein, 11 aa, SARS-CoV Virus
IANELEALIKG

SEQ ID NO: 2729 - protein, 30 aa, SARS-CoV Virus
LPSFIERNYFGSALKNSKKCNANNKPSERE

SEQ ID NO: 2730 - protein, 24 aa, SARS-CoV Virus
RYRCCSMNSTCRRSIVNFYWLCSN

SEQ ID NO: 2731 - protein, 16 aa, SARS-CoV Virus
SKSKKSHKQIHKFVYV

SEQ ID NO: 2732 - protein, 70 aa, SARS-CoV Virus
CNLTPLRTGSESSSSNLQQEPQEHAPLRQLQQLVMQQSKIVTMTMAISPAMKPSQTYQGHLIYCSYFPNS

SEQ ID NO: 2733 - protein, 20 aa, SARS-CoV Virus
RSMSDSFKFLATSLRRSISF

SEQ ID NO: 2734 - protein, 20 aa, SARS-CoV Virus
MLTTEALMPEMSPRSTSGDV

SEQ ID NO: 2735 - protein, 20 aa, SARS-CoV Virus
FLKYLSSSSLNESSSGCRGS

SEQ ID NO: 2736 - protein, 54 aa, SARS-CoV Virus
TVLLMMPITTSQFPETNVLSVVIICGEKKFLCVINQEVPLNTKTPSRGKYALPS

SEQ ID NO: 2737 - protein, 35 aa, SARS-CoV Virus
QIAGAVVKFLSWDGTYVTCRKTTPCGAACGKDIRW

SEQ ID NO: 2738 - protein, 39 aa, SARS-CoV Virus
PFPQKSTLFDCPRTHSDILVAARLAEALISAALISCCVT

SEQ ID NO: 2739 - protein, 44 aa, SARS-CoV Virus
SLPVINLSICTSASTLSSRERISFSTLEIAPKLELSCLTSVFNA

SEQ ID NO: 2740 - protein, 21 aa, SARS-CoV Virus
AFWLTTSCSLPNAVDVVVSDS

SEQ ID NO: 2741 - protein, 15 aa, SARS-CoV Virus
LIALLNWLAICFWFS

SEQ ID NO: 2742 - protein, 21 aa, SARS-CoV Virus
RTFWVTPMPLNLYAICIAKGI

SEQ ID NO: 2743 - protein, 21 aa, SARS-CoV Virus
RAAPAPNVHPAVAVPLTRAAV

SEQ ID NO: 2744 - protein, 88 aa, SARS-CoV Virus
AAIISSVSRGGNTVSPLNFCAQMRSLALISPRHSPYCFMKPASASVTLLKSKSSIKDLLVGFRGSGNICEKLKPPKYFKVGVLYICLT

SEQ ID NO: 2745 - protein, 76 aa, SARS-CoV Virus
ANTSRVLRSCSAAIPESARFSCVQKLPYWRSKLAHSVESPQMYILQSTEVLAIETGITSVVMLIEKLVGIAMVLLE

SEQ ID NO: 2746 - protein, 11 aa, SARS-CoV Virus
AIELSAPKDIV

SEQ ID NO: 2747 - protein, 16 aa, SARS-CoV Virus
ATIDFWLVLRNKETVW

SEQ ID NO: 2748 - protein, 13 aa, SARS-CoV Virus
LAQMPAPIGMSHS

SEQ ID NO: 2749 - protein, 13 aa, SARS-CoV Virus
EVSTCSAPIRQPA

SEQ ID NO: 2750 - protein, 17 aa, SARS-CoV Virus
VWNTLFPVEYMRQAGVS

SEQ ID NO: 2751 - protein, 11 aa, SARS-CoV Virus
IAVETSVQLTS

SEQ ID NO: 2752 - protein, 49 aa, SARS-CoV Virus
YRTATSDEAFVPGVITLTPPKEQGEMSNISDVLGSRTESVKSETSRPNC

SEQ ID NO: 2753 - protein, 51 aa, SARS-CoV Virus
NLFEEGVNTPVPVSPLKLKLTHWFLIRSVDNFGPQTVAGAFKSSKESTTTL

SEQ ID NO: 2754 - protein, 6 aa, SARS-CoV Virus
PMPVVV

SEQ ID NO: 2755 - protein, 5 aa, SARS-CoV Virus
SFNGQ

SEQ ID NO: 2756 - protein, 36 aa, SARS-CoV Virus
QLRAGGVQGLPSGEKGTLDMSLSKGLSLPCLRYLYL

SEQ ID NO: 2757 - protein, 25 aa, SARS-CoV Virus
LPVEVASMFLVFQARTQPMKSSGNL

SEQ ID NO: 2758 - protein, 24 aa, SARS-CoV Virus
SAITPVCPGAICLTSSPLTTKESA

SEQ ID NO: 2759 - protein, 15 aa, SARS-CoV Virus
TLEKQRSFNLVAETP

SEQ ID NO: 2760 - protein, 10 aa, SARS-CoV Virus
HLKVEKNVEL

SEQ ID NO: 2761 - protein, 13 aa, SARS-CoV Virus
SATQLEIFFLSHA

SEQ ID NO: 2762 - protein, 37 aa, SARS-CoV Virus
TEGNLVALKTSPKGHKFVILGNLTTSPEGTTLKLEVW

SEQ ID NO: 2763 - protein, 19 aa, SARS-CoV Virus
IPLSISKLLTEHLSSASGF

SEQ ID NO: 2764 - protein, 23 aa, SARS-CoV Virus
EQSTASVIVPFSSYLSINVVGFK

SEQ ID NO: 2765 - protein, 9 aa, SARS-CoV Virus
AAADVPQMS

SEQ ID NO: 2766 - protein, 40 aa, SARS-CoV Virus
AGEKAVRMALKFVMLIPRGNLKIGFKVLKPEGRSRTTSIG

SEQ ID NO: 2767 - protein, 106 aa, SARS-CoV Virus
RNPSLFLNTNSRKCLKLPDFSETSSEKASDMYSKVQLNALSNIIVCVCVPMGLETAKKGLSHNSKLHARITTLVELLIIITDCDLLFMVEPKTQPRTTFDFSVAAK

SEQ ID NO: 2768 - protein, 13 aa, SARS-CoV Virus
IPSLKGMTGLPNV

SEQ ID NO: 2769 - protein, 6 aa, SARS-CoV Virus
NPVTLE

SEQ ID NO: 2770 - protein, 6 aa, SARS-CoV Virus
NGRNKS

SEQ ID NO: 2771 - protein, 10 aa, SARS-CoV Virus
RVSDLKISSG

SEQ ID NO: 2772 - protein, 8 aa, SARS-CoV Virus
TPLIDEVC

SEQ ID NO: 2773 - protein, 27 aa, SARS-CoV Virus
TSSKVVHRSRSLPLVRVRNNKKINMFV

SEQ ID NO: 2774 - protein, 26 aa, SARS-CoV Virus
LLTRISLETTTLLFSLMISLPFSRRE

SEQ ID NO: 2775 - protein, 5 aa, SARS-CoV Virus
IISLI

SEQ ID NO: 2776 - protein, 23 aa, SARS-CoV Virus
FSLRDITAVPLNLRGNLLMSKSE

SEQ ID NO: 2777 - protein, 13 aa, SARS-CoV Virus
EDNWIGFVFLQKM

SEQ ID NO: 2778 - protein, 5 aa, SARS-CoV Virus
LACMV

SEQ ID NO: 2779 - protein, 10 aa, SARS-CoV Virus
PSICSFGLPR

SEQ ID NO: 2780 - protein, 29 aa, SARS-CoV Virus
LAPIKNASDDDAFTFVTKAVHHEKWPISL

SEQ ID NO: 2781 - protein, 28 aa, SARS-CoV Virus
RSAFQECSVIFTAIEPPRASFCFINPHR

SEQ ID NO: 2782 - protein, 82 aa, SARS-CoV Virus
VKNPSLESFSFVTCLVLGSYISLIIRSHLLAVCTVAQSPIKVESASETKSLRSESTSSVPVGNHCLSTAVPGATPLSEPAPK

SEQ ID NO: 2783 - protein, 5 aa, SARS-CoV Virus
ITLML

SEQ ID NO: 2784 - protein, 10 aa, SARS-CoV Virus
GTAKVSVFKY

SEQ ID NO: 2785 - protein, 18 aa, SARS-CoV Virus
VYFATFIIIPFGITAFSP

SEQ ID NO: 2786 - protein, 24 aa, SARS-CoV Virus
RSHFSRSILCILYKLGIATPGCHA

SEQ ID NO: 2787 - protein, 6 aa, SARS-CoV Virus
LACSFG

SEQ ID NO: 2788 - protein, 17 aa, SARS-CoV Virus
KVSTCPSLHQSMNEISA

SEQ ID NO: 2789 - protein, 45 aa, SARS-CoV Virus
SIVTLTTFEITDKSCDFIISTKSSSKRSITEHTHFDEPVCASVMK

SEQ ID NO: 2790 - protein, 28 aa, SARS-CoV Virus
FFTVLSIGIKSSNLSGESCERLAKPIIK

SEQ ID NO: 2791 - protein, 6 aa, SARS-CoV Virus
RPPSCP

SEQ ID NO: 2792 - protein, 4 aa, SARS-CoV Virus
LKSP

SEQ ID NO: 2793 - protein, 6 aa, SARS-CoV Virus
TMCSKA

SEQ ID NO: 2794 - protein, 33 aa, SARS-CoV Virus
PSSLYRCMNSSIASSRKSVSICDLGLKSSKSLL

SEQ ID NO: 2795 - protein, 5 aa, SARS-CoV Virus
VSGNC

SEQ ID NO: 2796 - protein, 8 aa, SARS-CoV Virus
IMPSTFLK

SEQ ID NO: 2797 - protein, 89 aa, SARS-CoV Virus
LNCVFTDSPINVTPLTLACAGPFEGVRPLTEPSVIKTPLRAFLKRSTCPSTLPSNKTVSEEQALSVGFLAMSVIVQTPIVDTCAGASLL

SEQ ID NO: 2798 - protein, 55 aa, SARS-CoV Virus
SQITVLAAISTPKLLSILISGTGLMLRLAQSSNATLTGSVVLFSKISTSIPSTFV

SEQ ID NO: 2799 - protein, 24 aa, SARS-CoV Virus
TALLMMETGASPACPSKCPLLTTL

SEQ ID NO: 2800 - protein, 16 aa, SARS-CoV Virus
ATFSKLCNLVNVFHRL

SEQ ID NO: 2801 - protein, 5 aa, SARS-CoV Virus
VSNCL

SEQ ID NO: 2802 - protein, 45 aa, SARS-CoV Virus
IHRLNPAEIIILYASKYCRYSFAWCLQTAPPKLHRVIHVADLSGT

SEQ ID NO: 2803 - protein, 9 aa, SARS-CoV Virus
SISDTTCLP

SEQ ID NO: 2804 - protein, 7 aa, SARS-CoV Virus
DSQGLSE

SEQ ID NO: 2805 - protein, 53 aa, SARS-CoV Virus
KKGNCFKLVNALLSKAGVWNACLFTYKLPPSQPGKFKFDKTLVSNLHTIALAG

SEQ ID NO: 2806 - protein, 17 aa, SARS-CoV Virus
RSTLQFQNKQTPSVNLS

SEQ ID NO: 2807 - protein, 6 aa, SARS-CoV Virus
KSSSIL

SEQ ID NO: 2808 - protein, 6 aa, SARS-CoV Virus
ALSLHG

SEQ ID NO: 2809 - protein, 7 aa, SARS-CoV Virus
NFHSTSA

SEQ ID NO: 2810 - protein, 12 aa, SARS-CoV Virus
GTHLIAFGFPMS

SEQ ID NO: 2811 - protein, 75 aa, SARS-CoV Virus
RTGNLSASNADFTTMCCTFLQAELTLSSSPIIGYSTDQSTRLTKHSWTAKHLVMIASQLATCAFPCTWQCWSWLL

SEQ ID NO: 2812 - protein, 8 aa, SARS-CoV Virus
RLPVKPHC

SEQ ID NO: 2813 - protein, 7 aa, SARS-CoV Virus
TSIINGL

SEQ ID NO: 2814 - protein, 5 aa, SARS-CoV Virus
SKPTE

SEQ ID NO: 2815 - protein, 4 aa, SARS-CoV Virus
FQQA

SEQ ID NO: 2816 - protein, 99 aa, SARS-CoV Virus
VSDEVEKQVARLSHRQHVLSGPILTKYFIDVSSKPCAQRTNTTLSDNPFSVSLSICTILIRTTFQGKPLYMSGIRCLNWSPGGGFALTLVNSVLFSVST

SEQ ID NO: 2817 - protein, 28 aa, SARS-CoV Virus
PVGTATKLTPVENPSWRGRLVPTASLVA

SEQ ID NO: 2818 - protein, 12 aa, SARS-CoV Virus
QPSTSKPIHART

SEQ ID NO: 2819 - protein, 12 aa, SARS-CoV Virus
RIASSRVINILG

SEQ ID NO: 2820 - protein, 4 aa, SARS-CoV Virus
PLTW

SEQ ID NO: 2821 - protein, 12 aa, SARS-CoV Virus
FILKPIIEMSLR

SEQ ID NO: 2822 - protein, 31 aa, SARS-CoV Virus
VMSFGMPGMSTHNPSVLNFISTLRCVGACVG

SEQ ID NO: 2823 - protein, 37 aa, SARS-CoV Virus
RPVMILLQSLKSPVTFSACNVATLRRGISRLVNCSLS

SEQ ID NO: 2824 - protein, 38 aa, SARS-CoV Virus
RSLSDIMHKMPIFALVIATLKRLTLQECAVSVVCVNMT

SEQ ID NO: 2825 - protein, 27 aa, SARS-CoV Virus
SYSEPCDESTVCVGNPKIFEATAFCEL

SEQ ID NO: 2826 - protein, 22 aa, SARS-CoV Virus
GEIKTAFLQAGLRVRNSLTTPI

SEQ ID NO: 2827 - protein, 15 aa, SARS-CoV Virus
GLLIADETSCVITPL

SEQ ID NO: 2828 - protein, 5 aa, SARS-CoV Virus
NILKH

SEQ ID NO: 2829 - protein, 12 aa, SARS-CoV Virus
ADLSLCAFSLLS

SEQ ID NO: 2830 - protein, 52 aa, SARS-CoV Virus
TKALTVSTISAGQRRQVPRNMSGPIVFISLHTELKYSGSSVPLVSNVRGAGN

SEQ ID NO: 2831 - protein, 5 aa, SARS-CoV Virus
AGSPI

SEQ ID NO: 2832 - protein, 13 aa, SARS-CoV Virus
CFARSLALTTLKS

SEQ ID NO: 2833 - protein, 70 aa, SARS-CoV Virus
LVAIEISSKTTMSAVVSGNAFTVQKTYCSSVEFTLNLSKHSTRARAGMILLHLSMGKYFNAFSHRASTAA

SEQ ID NO: 2834 - protein, 11 aa, SARS-CoV Virus
EHAVYTMRADG

SEQ ID NO: 2835 - protein, 7 aa, SARS-CoV Virus
RASPMAK

SEQ ID NO: 2836 - protein, 19 aa, SARS-CoV Virus
LLPVPGGPWSVEYFCMPTF

SEQ ID NO: 2837 - protein, 22 aa, SARS-CoV Virus
FATLLENSSEMLSVGYKPVILT

SEQ ID NO: 2838 - protein, 15 aa, SARS-CoV Virus
CSCGTRVGALSGITV

SEQ ID NO: 2839 - protein, 5 aa, SARS-CoV Virus
DVNTK

SEQ ID NO: 2840 - protein, 18 aa, SARS-CoV Virus
SPTFNLYVVVPLYTTASP

SEQ ID NO: 2841 - protein, 19 aa, SARS-CoV Virus
SPFSKVYSPICTLLFLVTR

SEQ ID NO: 2842 - protein, 4 aa, SARS-CoV Virus
PVKT

SEQ ID NO: 2843 - protein, 59 aa, SARS-CoV Virus
FLFNGGLGFPTSHERCNSLSESTSRTVAIPYDSLNVSSVALSVSAAKSLSLSVQVLASM

SEQ ID NO: 2844 - protein, 31 aa, SARS-CoV Virus
SPALVQSHVAIALKSVTLSLPTHVFLYKPKT

SEQ ID NO: 2845 - protein, 16 aa, SARS-CoV Virus
PLAHNGKLMGGLCDLQ

SEQ ID NO: 2846 - protein, 21 aa, SARS-CoV Virus
LIPPRYSCVTSVTSQPGALQT

SEQ ID NO: 2847 - protein, 16 aa, SARS-CoV Virus
GLTDNTNLCDVEMTWS

SEQ ID NO: 2848 - protein, 41 aa, SARS-CoV Virus
QHLQHRNGLLIQAPQRSEVCELHNTQAPTACKTVCGVYIAS

SEQ ID NO: 2849 - protein, 38 aa, SARS-CoV Virus
NSGSQYREVLSLVSITEYMSNMWPVSSSCNFLMYCKYK

SEQ ID NO: 2850 - protein, 6 aa, SARS-CoV Virus
KTSAYS

SEQ ID NO: 2851 - protein, 7 aa, SARS-CoV Virus
LGCFVSG

SEQ ID NO: 2852 - protein, 35 aa, SARS-CoV Virus
ASIASDTNLSIISVPSVLTISSTKQPAPNILDGSG

SEQ ID NO: 2853 - protein, 4 aa, SARS-CoV Virus
GRYT

SEQ ID NO: 2854 - protein, 15 aa, SARS-CoV Virus
SSPCLTSIVCCEQNS

SEQ ID NO: 2855 - protein, 20 aa, SARS-CoV Virus
GPLVRSVSVQHFASDMNTLF

SEQ ID NO: 2856 - protein, 13 aa, SARS-CoV Virus
RTALKFLMLATKP

SEQ ID NO: 2857 - protein, 17 aa, SARS-CoV Virus
HTTASSERIIMEKCLRR

SEQ ID NO: 2858 - protein, 6 aa, SARS-CoV Virus
NSSTNS

SEQ ID NO: 2859 - protein, 6 aa, SARS-CoV Virus
STSLFL

SEQ ID NO: 2860 - protein, 29 aa, SARS-CoV Virus
SLCCRLRTYLSAILLPSVERSAFTLAVTA

SEQ ID NO: 2861 - protein, 8 aa, SARS-CoV Virus
QMLKTLLA

SEQ ID NO: 2862 - protein, 35 aa, SARS-CoV Virus
AVVASPDDVPPGLTYSEPPHMTISLNTCAHSLANL

SEQ ID NO: 2863 - protein, 33 aa, SARS-CoV Virus
KRCDKLQQVLCLRARTREAIILSMLGMALSHFG

SEQ ID NO: 2864 - protein, 12 aa, SARS-CoV Virus
SQPIRCGVSTSL

SEQ ID NO: 2865 - protein, 10 aa, SARS-CoV Virus
TVFNILCQPP

SEQ ID NO: 2866 - protein, 21 aa, SARS-CoV Virus
NLLVPITTVAPLVAAIDFNNF

SEQ ID NO: 2867 - protein, 30 aa, SARS-CoV Virus
NCLFVIVLQIETPATVRALFFALMAYLRFI

SEQ ID NO: 2868 - protein, 16 aa, SARS-CoV Virus
VIVGMTLRLVYAKSAS

SEQ ID NO: 2869 - protein, 4 aa, SARS-CoV Virus
LIES

SEQ ID NO: 2870 - protein, 31 aa, SARS-CoV Virus
SLALPHLLNGKPADLSRLLTITWLALIQPPS

SEQ ID NO: 2871 - protein, 24 aa, SARS-CoV Virus
QSKYLSTTSTTNRSCLISHIVGRL

SEQ ID NO: 2872 - protein, 8 aa, SARS-CoV Virus
SLIAALPS

SEQ ID NO: 2873 - protein, 23 aa, SARS-CoV Virus
AKKKCFSSTELPSLKKPLDTAKS

SEQ ID NO: 2874 - protein, 11 aa, SARS-CoV Virus
KSLLKLPGLTV

SEQ ID NO: 2875 - protein, 50 aa, SARS-CoV Virus
KATLFVSAATEKHVVRLSSNKLPEAACIAGSAAYTKSSLKLRRELCKFTS

SEQ ID NO: 2876 - protein, 47 aa, SARS-CoV Virus
LCTTPNSRKWYPVETTKGTPSTNIFLTSGPKLVGGNTVENNTLKFAQ

SEQ ID NO: 2877 - protein, 22 aa, SARS-CoV Virus
RIHLSSKQLIQLGWYVWSQYLK

SEQ ID NO: 2878 - protein, 47 aa, SARS-CoV Virus
RSKRQSLSSVKSYFSKSHLISGFARSASIWDSAANALVKVRMGISNE

SEQ ID NO: 2879 - protein, 27 aa, SARS-CoV Virus
YESTIGTPQPGATCTKSPKSYQFPLRS

SEQ ID NO: 2880 - protein, 53 aa, SARS-CoV Virus
LSNVSTPTMPASRIASQNCTVFNNDWRTRSPKLAYTRKMSGFSTKSYQSFLLK

SEQ ID NO: 2881 - protein, 22 aa, SARS-CoV Virus
SSSQQLYVTSISFNVSQLPSSK

SEQ ID NO: 2882 - protein, 11 aa, SARS-CoV Virus
TKSAIVYLVRR

SEQ ID NO: 2883 - protein, 29 aa, SARS-CoV Virus
RDICGTMSPSTLNLKKSWTATAGQSLTKL

SEQ ID NO: 2884 - protein, 6 aa, SARS-CoV Virus
IVSSCW

SEQ ID NO: 2885 - protein, 10 aa, SARS-CoV Virus
LDIVCLLTTK

SEQ ID NO: 2886 - protein, 30 aa, SARS-CoV Virus
ESNKLPSSSFSWKRQQLVFRNFAKPALFSL

SEQ ID NO: 2887 - protein, 5 aa, SARS-CoV Virus
ISKAL

SEQ ID NO: 2888 - protein, 57 aa, SARS-CoV Virus
TTSVLVPVPHGVRRAALTPQTRLKTLMHPQTASRVRGVGHNYSHNLSTFRRRYRLCF

SEQ ID NO: 2889 - protein, 5 aa, SARS-CoV Virus
NPLGH

SEQ ID NO: 2890 - protein, 13 aa, SARS-CoV Virus
VFGRTYLSSHRIL

SEQ ID NO: 2891 - protein, 24 aa, SARS-CoV Virus
DLDGQCGIYNTDNMKHHQRTLGPC

SEQ ID NO: 2892 - protein, 5 aa, SARS-CoV Virus
LLVLQ

SEQ ID NO: 2893 - protein, 16 aa, SARS-CoV Virus
LPVLYQCVYTTSSHSW

SEQ ID NO: 2894 - protein, 13 aa, SARS-CoV Virus
LVVLHLLGNPYML

SEQ ID NO: 2895 - protein, 19 aa, SARS-CoV Virus
QGLLQKHRRKAQLNWQVLL

SEQ ID NO: 2896 - protein, 8 aa, SARS-CoV Virus
HFQPEDVL

SEQ ID NO: 2897 - protein, 16 aa, SARS-CoV Virus
QLNCPAPYLYLGCLSL

SEQ ID NO: 2898 - protein, 6 aa, SARS-CoV Virus
STSISL

SEQ ID NO: 2899 - protein, 6 aa, SARS-CoV Virus
ALLVCL

SEQ ID NO: 2900 - protein, 18 aa, SARS-CoV Virus
QTYKVVPVLCKLYLYHHS

SEQ ID NO: 2901 - protein, 53 aa, SARS-CoV Virus
DLGGLIVMPAQTYLPSNCYSRQVHCHQYKLFVWYQPHRTSVVVLLDSVHYSVV

SEQ ID NO: 2902 - protein, 8 aa, SARS-CoV Virus
QLSWLLEL

SEQ ID NO: 2903 - protein, 11 aa, SARS-CoV Virus
EAKPNLVNCPC

SEQ ID NO: 2904 - protein, 21 aa, SARS-CoV Virus
VEQSCYPHQQLAGFPRVQMHM

SEQ ID NO: 2905 - protein, 18 aa, SARS-CoV Virus
RCYHHKCSCRYHNQGQQP

SEQ ID NO: 2906 - protein, 4 aa, SARS-CoV Virus
VWLL

SEQ ID NO: 2907 - protein, 9 aa, SARS-CoV Virus
VEHNHHAHC

SEQ ID NO: 2908 - protein, 7 aa, SARS-CoV Virus
VHHYQAS

SEQ ID NO: 2909 - protein, 5 aa, SARS-CoV Virus
RALFA

SEQ ID NO: 2910 - protein, 17 aa, SARS-CoV Virus
LLLPSCPQILPVCTFGS

SEQ ID NO: 2911 - protein, 20 aa, SARS-CoV Virus
PDLPSFPTCVAWQHHGQTQI

SEQ ID NO: 2912 - protein, 9 aa, SARS-CoV Virus
PHSKISLTF

SEQ ID NO: 2913 - protein, 7 aa, SARS-CoV Virus
ERLQNHH

SEQ ID NO: 2914 - protein, 20 aa, SARS-CoV Virus
LQPAHRPPGQWHKRHMMVKN

SEQ ID NO: 2915 - protein, 4 aa, SARS-CoV Virus
ILKQ

SEQ ID NO: 2916 - protein, 11 aa, SARS-CoV Virus
HGYRAFPRTTY

SEQ ID NO: 2917 - protein, 41 aa, SARS-CoV Virus
CLQHPAWIAKQTKEKPSSRKLQLCLLQEEYHCGVVHIVPTI

SEQ ID NO: 2918 - protein, 5 aa, SARS-CoV Virus
KMTLL

SEQ ID NO: 2919 - protein, 18 aa, SARS-CoV Virus
VVEEPRAVPQMCTLRQTF

SEQ ID NO: 2920 - protein, 10 aa, SARS-CoV Virus
YMVYLQYPTT

SEQ ID NO: 2921 - protein, 6 aa, SARS-CoV Virus
KHQYYS

SEQ ID NO: 2922 - protein, 10 aa, SARS-CoV Virus
EAKAPGSSYT

SEQ ID NO: 2923 - protein, 9 aa, SARS-CoV Virus
RPSSHKHQE

SEQ ID NO: 2924 - protein, 20 aa, SARS-CoV Virus
VNRKGQSSSSNNSLRNNKQA

SEQ ID NO: 2925 - protein, 7 aa, SARS-CoV Virus
YTVRCCQ

SEQ ID NO: 2926 - protein, 12 aa, SARS-CoV Virus
ITMGNTQHTQTL

SEQ ID NO: 2927 - protein, 5 aa, SARS-CoV Virus
RHQNS

SEQ ID NO: 2928 - protein, 4 aa, SARS-CoV Virus
RLQK

SEQ ID NO: 2929 - protein, 6 aa, SARS-CoV Virus
LRPTWK

SEQ ID NO: 2930 - protein, 14 aa, SARS-CoV Virus
LDLKHYHSRLCKQV

SEQ ID NO: 2931 - protein, 8 aa, SARS-CoV Virus
HSSVSKHV

SEQ ID NO: 2932 - protein, 10 aa, SARS-CoV Virus
QHHHKQCELS

SEQ ID NO: 2933 - protein, 8 aa, SARS-CoV Virus
AKLKLKHT

SEQ ID NO: 2934 - protein, 6 aa, SARS-CoV Virus
AYNQTS

SEQ ID NO: 2935 - protein, 8 aa, SARS-CoV Virus
CQPIQAMS

SEQ ID NO: 2936 - protein, 5 aa, SARS-CoV Virus
YASPS

SEQ ID NO: 2937 - protein, 6 aa, SARS-CoV Virus
QACRPY

SEQ ID NO: 2938 - protein, 20 aa, SARS-CoV Virus
SKQLLQEKVTETSTRMRAYA

SEQ ID NO: 2939 - protein, 6 aa, SARS-CoV Virus
HMQQLP

SEQ ID NO: 2940 - protein, 37 aa, SARS-CoV Virus
MARKHSRKQRKTVTTVYFEQESIVMSRKLKASNDECP

SEQ ID NO: 2941 - protein, 5 aa, SARS-CoV Virus
TYLGR

SEQ ID NO: 2942 - protein, 5 aa, SARS-CoV Virus
HQSIV

SEQ ID NO: 2943 - protein, 5 aa, SARS-CoV Virus
QHQMV

SEQ ID NO: 2944 - protein, 5 aa, SARS-CoV Virus
THLLK

SEQ ID NO: 2945 - protein, 4 aa, SARS-CoV Virus
CYQG

SEQ ID NO: 2946 - protein, 49 aa, SARS-CoV Virus
YDHSYHSAAALSKQHTYLRRQFLFEQKEVPICQHDLVSKVHSCTSLPQG

SEQ ID NO: 2947 - protein, 4 aa, SARS-CoV Virus
SHSK

SEQ ID NO: 2948 - protein, 6 aa, SARS-CoV Virus
ETTYHH

SEQ ID NO: 2949 - protein, 61 aa, SARS-CoV Virus
QQHTAMPKHLMLWLCLYLQPVQFVCQQMDHRIYLLSQYQRVLLLEAPYDAYSRKTRNHNQC

SEQ ID NO: 2950 - protein, 8 aa, SARS-CoV Virus
NQHYHMIH

SEQ ID NO: 2951 - protein, 4 aa, SARS-CoV Virus
GKNL

SEQ ID NO: 2952 - protein, 35 aa, SARS-CoV Virus
VSWHTDKHQMVNHCSMLELKMFDQVGYGQIYTWVS

SEQ ID NO: 2953 - protein, 4 aa, SARS-CoV Virus
KYQL

SEQ ID NO: 2954 - protein, 5 aa, SARS-CoV Virus
ADNFA

SEQ ID NO: 2955 - protein, 18 aa, SARS-CoV Virus
HEVEHCQPEQESYGWICE

SEQ ID NO: 2956 - protein, 5 aa, SARS-CoV Virus
ADLHS

SEQ ID NO: 2957 - protein, 7 aa, SARS-CoV Virus
ACLLLCK

SEQ ID NO: 2958 - protein, 14 aa, SARS-CoV Virus
HVLDSILCHPTTIH

SEQ ID NO: 2959 - protein, 20 aa, SARS-CoV Virus
FHRLLVPCTLQLCLTGMPFS

SEQ ID NO: 2960 - protein, 8 aa, SARS-CoV Virus
NHSAEQQK

SEQ ID NO: 2961 - protein, 15 aa, SARS-CoV Virus
LMSVVVGREHQHLSC

SEQ ID NO: 2962 - protein, 17 aa, SARS-CoV Virus
SHLEPLLSGSKLLHDSW

SEQ ID NO: 2963 - protein, 5 aa, SARS-CoV Virus
YLRLH

SEQ ID NO: 2964 - protein, 15 aa, SARS-CoV Virus
NTCTCYIEQDTCYTV

SEQ ID NO: 2965 - protein, 15 aa, SARS-CoV Virus
VATVSRYAILGTFPC

SEQ ID NO: 2966 - protein, 12 aa, SARS-CoV Virus
AKRYTKQPPRRY

SEQ ID NO: 2967 - protein, 22 aa, SARS-CoV Virus
RTNGSASEKYRIHRLLLSKKAQ

SEQ ID NO: 2968 - protein, 17 aa, SARS-CoV Virus
EKTWQTIEGEPRMKHHW

SEQ ID NO: 2969 - protein, 25 aa, SARS-CoV Virus
NRMSSTSKRLSRLPAESCKLVPDRV

SEQ ID NO: 2970 - protein, 8 aa, SARS-CoV Virus
KTSKTKVH

SEQ ID NO: 2971 - protein, 12 aa, SARS-CoV Virus
QQQHGCTHQKHV

SEQ ID NO: 2972 - protein, 11 aa, SARS-CoV Virus
SSRQHKSPIWQ

SEQ ID NO: 2973 - protein, 20 aa, SARS-CoV Virus
YHQPLLKQTHLKHPQVAQEE

SEQ ID NO: 2974 - protein, 19 aa, SARS-CoV Virus
DSSHQHHRKLLIELCNAHY

SEQ ID NO: 2975 - protein, 6 aa, SARS-CoV Virus
EPIYHW

SEQ ID NO: 2976 - protein, 25 aa, SARS-CoV Virus
IGKYLLLTFRMYHVYSTQHQKLLLL

SEQ ID NO: 2977 - protein, 7 aa, SARS-CoV Virus
QNPPGKC

SEQ ID NO: 2978 - protein, 4 aa, SARS-CoV Virus
WNHP

SEQ ID NO: 2979 - protein, 13 aa, SARS-CoV Virus
AHNECLDEAHYKK

SEQ ID NO: 2980 - protein, 5 aa, SARS-CoV Virus
NPLAN

SEQ ID NO: 2981 - protein, 10 aa, SARS-CoV Virus
CHNNMAQVCP

SEQ ID NO: 2982 - protein, 12 aa, SARS-CoV Virus
KLYTQQQERKQR

SEQ ID NO: 2983 - protein, 6 aa, SARS-CoV Virus
QNHYTQ

SEQ ID NO: 2984 - protein, 12 aa, SARS-CoV Virus
VWKVCSKCCQQH

SEQ ID NO: 2985 - protein, 11 aa, SARS-CoV Virus
KHEVENARSHH

SEQ ID NO: 2986 - protein, 12 aa, SARS-CoV Virus
LLSAQYPVSQAL

SEQ ID NO: 2987 - protein, 5 aa, SARS-CoV Virus
NQSLL

SEQ ID NO: 2988 - protein, 17 aa, SARS-CoV Virus
QLLQGSFCHFCMNHHAG

SEQ ID NO: 2989 - protein, 15 aa, SARS-CoV Virus
TMRQNQHVYLQNNHQ

SEQ ID NO: 2990 - protein, 9 aa, SARS-CoV Virus
HHPEWLCNQ

SEQ ID NO: 2991 - protein, 15 aa, SARS-CoV Virus
FHLCNHHGLTMYVLA

SEQ ID NO: 2992 - protein, 15 aa, SARS-CoV Virus
RYNKPMQQERTIMWP

SEQ ID NO: 2993 - protein, 5 aa, SARS-CoV Virus
QSYHP

SEQ ID NO: 2994 - protein, 4 aa, SARS-CoV Virus
HKLV

SEQ ID NO: 2995 - protein, 28 aa, SARS-CoV Virus
KVCCSSWQQYEFVYAAVQIKTCSLLHSR

SEQ ID NO: 2996 - protein, 11 aa, SARS-CoV Virus
VKHCDFLLLGH

SEQ ID NO: 2997 - protein, 23 aa, SARS-CoV Virus
YALHYSQYMRQDLWASCFQPYYR

SEQ ID NO: 2998 - protein, 17 aa, SARS-CoV Virus
NCYNCHLSLLSQSDVKV

SEQ ID NO: 2999 - protein, 19 aa, SARS-CoV Virus
HPLCQHRYQQHLVGQLTRM

SEQ ID NO: 3000 - protein, 16 aa, SARS-CoV Virus
KGHHLKLHPLLTRCEL

SEQ ID NO: 3001 - protein, 4 aa, SARS-CoV Virus
QQVP

SEQ ID NO: 3002 - protein, 13 aa, SARS-CoV Virus
KLLKRCRHKHQTS

SEQ ID NO: 3003 - protein, 19 aa, SARS-CoV Virus
RKLQYYLQRLIQELGQATE

SEQ ID NO: 3004 - protein, 13 aa, SARS-CoV Virus
VGTSADCSTQKQT

SEQ ID NO: 3005 - protein, 13 aa, SARS-CoV Virus
KQTRRIWTCHQKL

SEQ ID NO: 3006 - protein, 4 aa, SARS-CoV Virus
AVNL

SEQ ID NO: 3007 - protein, 6 aa, SARS-CoV Virus
LSNCLN

SEQ ID NO: 3008 - protein, 38 aa, SARS-CoV Virus
QNGRADVSHRSFDQPCQSRGEARHFSQQHYQQYTMTGQ

SEQ ID NO: 3009 - protein, 11 aa, SARS-CoV Virus
TGVTNHEQLHH

SEQ ID NO: 3010 - protein, 10 aa, SARS-CoV Virus
MYYQCKMCHN

SEQ ID NO: 3011 - protein, 25 aa, SARS-CoV Virus
DNSNCESCRSHGLHLHRHRKISSCH

SEQ ID NO: 3012 - protein, 24 aa, SARS-CoV Virus
LYTQRVWHDCAYSTSCKSKRCNHP

SEQ ID NO: 3013 - protein, 18 aa, SARS-CoV Virus
YEHSSSICSRKKQRRCTS

SEQ ID NO: 3014 - protein, 11 aa, SARS-CoV Virus
PLQKRVPFVQY

SEQ ID NO: 3015 - protein, 4 aa, SARS-CoV Virus
AKNC

SEQ ID NO: 3016 - protein, 9 aa, SARS-CoV Virus
QNSQRTPAL

SEQ ID NO: 3017 - protein, 10 aa, SARS-CoV Virus
LKDLINKRIL

SEQ ID NO: 3018 - protein, 55 aa, SARS-CoV Virus
TTYMPKPTQRPDLKLSSLACTMKSSPEWFQELDKNQGSLIHLNKCCKEKNLHRNP

SEQ ID NO: 3019 - protein, 4 aa, SARS-CoV Virus
DTIL

SEQ ID NO: 3020 - protein, 10 aa, SARS-CoV Virus
RHYNKKEHQN

SEQ ID NO: 3021 - protein, 24 aa, SARS-CoV Virus
IRVHQKQQLHRLENLSKYLTTIAT

SEQ ID NO: 3022 - protein, 8 aa, SARS-CoV Virus
KIWVTSHN

SEQ ID NO: 3023 - protein, 7 aa, SARS-CoV Virus
CRHPNII

SEQ ID NO: 3024 - protein, 4 aa, SARS-CoV Virus
VVKL

SEQ ID NO: 3025 - protein, 4 aa, SARS-CoV Virus
NWYF

SEQ ID NO: 3026 - protein, 8 aa, SARS-CoV Virus
KYTIGTIM

SEQ ID NO: 3027 - protein, 7 aa, SARS-CoV Virus
THKAYNC

SEQ ID NO: 3028 - protein, 7 aa, SARS-CoV Virus
THVVLIS

SEQ ID NO: 3029 - protein, 5 aa, SARS-CoV Virus
RNLML

SEQ ID NO: 3030 - protein, 8 aa, SARS-CoV Virus
LLLVLRMV

SEQ ID NO: 3031 - protein, 11 aa, SARS-CoV Virus
HKPKFYSKEHY

SEQ ID NO: 3032 - protein, 19 aa, SARS-CoV Virus
LQQYHEWQLFLNLRLVKAH

SEQ ID NO: 3033 - protein, 9 aa, SARS-CoV Virus
CLCFPHKQP

SEQ ID NO: 3034 - protein, 10 aa, SARS-CoV Virus
DPHDLTLVLL

SEQ ID NO: 3035 - protein, 6 aa, SARS-CoV Virus
HLHLMV

SEQ ID NO: 3036 - protein, 6 aa, SARS-CoV Virus
HCLQLR

SEQ ID NO: 3037 - protein, 6 aa, SARS-CoV Virus
FSRHTL

SEQ ID NO: 3038 - protein, 5 aa, SARS-CoV Virus
LPSVW

SEQ ID NO: 3039 - protein, 51 aa, SARS-CoV Virus
DFPLLLQRWVVDFHKQDCPFLVCLLLPELQMNLKYLLALYSKDNVNTKCLV

SEQ ID NO: 3040 - protein, 5 aa, SARS-CoV Virus
TLSWL

SEQ ID NO: 3041 - protein, 10 aa, SARS-CoV Virus
CAKQLAYAVI

SEQ ID NO: 3042 - protein, 9 aa, SARS-CoV Virus
NSLNSVYSQ

SEQ ID NO: 3043 - protein, 11 aa, SARS-CoV Virus
PLHRHSSLGRM

SEQ ID NO: 3044 - protein, 9 aa, SARS-CoV Virus
QIALVKLAL

SEQ ID NO: 3045 - protein, 13 aa, SARS-CoV Virus
SLSFDLNHQQILC

SEQ ID NO: 3046 - protein, 16 aa, SARS-CoV Virus
NYQNSHLVMVELVQGL

SEQ ID NO: 3047 - protein, 23 aa, SARS-CoV Virus
AALYSKHYPFYNTHPILVQSLCK

SEQ ID NO: 3048 - protein, 9 aa, SARS-CoV Virus
LHRVYTTQA

SEQ ID NO: 3049 - protein, 20 aa, SARS-CoV Virus
CKMFPCRKHQSLVLCTLTSL

SEQ ID NO: 3050 - protein, 11 aa, SARS-CoV Virus
GELRQYDRGSP

SEQ ID NO: 3051 - protein, 35 aa, SARS-CoV Virus
QLYECNDHTDSYQCTHSHIRMYLAVIYTQQVVQTS

SEQ ID NO: 3052 - protein, 11 aa, SARS-CoV Virus
QKKTLVVLDIV

SEQ ID NO: 3053 - protein, 13 aa, SARS-CoV Virus
HHDHTHMEWKHLS

SEQ ID NO: 3054 - protein, 18 aa, SARS-CoV Virus
DYHKIEYPYTSQLLHPLR

SEQ ID NO: 3055 - protein, 10 aa, SARS-CoV Virus
FSDHNVYTPH

SEQ ID NO: 3056 - protein, 8 aa, SARS-CoV Virus
ELALQIPN

SEQ ID NO: 3057 - protein, 7 aa, SARS-CoV Virus
HAVEDGS

SEQ ID NO: 3058 - protein, 14 aa, SARS-CoV Virus
HHQARQQFYYCKRV

SEQ ID NO: 3059 - protein, 4 aa, SARS-CoV Virus
VHKS

SEQ ID NO: 3060 - protein, 17 aa, SARS-CoV Virus
QHHQHGLYNKPLEVLVH

SEQ ID NO: 3061 - protein, 10 aa, SARS-CoV Virus
LQAVEVLIKH

SEQ ID NO: 3062 - protein, 9 aa, SARS-CoV Virus
TNNNCYQPI

SEQ ID NO: 3063 - protein, 44 aa, SARS-CoV Virus
LKLNHQLEEISISLCGLKQTCTYQENSHQEYGSTRKLHYVVCHH

SEQ ID NO: 3064 - protein, 14 aa, SARS-CoV Virus
VVQRKSYPHDLHEV

SEQ ID NO: 3065 - protein, 16 aa, SARS-CoV Virus
HQHHPSMLDQTAVHMS

SEQ ID NO: 3066 - protein, 9 aa, SARS-CoV Virus
TYPQAVCGD

SEQ ID NO: 3067 - protein, 5 aa, SARS-CoV Virus
CCPQL

SEQ ID NO: 3068 - protein, 37 aa, SARS-CoV Virus
PPAGIRDSLVCQVKEPHRQDETRRGSPECGTQFCHHA

SEQ ID NO: 3069 - protein, 37 aa, SARS-CoV Virus
EIQHLTLYAVLNRTNLCKSQPKKLFLQSAPQMSLMTK

SEQ ID NO: 3070 - protein, 5 aa, SARS-CoV Virus
GIHYM

SEQ ID NO: 3071 - protein, 13 aa, SARS-CoV Virus
QHLVMILTLRQEL

SEQ ID NO: 3072 - protein, 11 aa, SARS-CoV Virus
ENAYSAQPLQD

SEQ ID NO: 3073 - protein, 10 aa, SARS-CoV Virus
NHVSHNQLAL

SEQ ID NO: 3074 - protein, 10 aa, SARS-CoV Virus
QAAHLESSAS

SEQ ID NO: 3075 - protein, 6 aa, SARS-CoV Virus
KLQALY

SEQ ID NO: 3076 - protein, 16 aa, SARS-CoV Virus
YKRRIGHHSQRCPLEF

SEQ ID NO: 3077 - protein, 13 aa, SARS-CoV Virus
FLYTYVGWLPLWL

SEQ ID NO: 3078 - protein, 4 aa, SARS-CoV Virus
HPCI

SEQ ID NO: 3079 - protein, 26 aa, SARS-CoV Virus
ALIFLSLQHEQAFLSNSRIQFLESLP

SEQ ID NO: 3080 - protein, 14 aa, SARS-CoV Virus
VLLKVVHKMQICIS

SEQ ID NO: 3081 - protein, 32 aa, SARS-CoV Virus
LPQVYNQHILVQGTWLYTHQLALSSKLLRASQ

SEQ ID NO: 3082 - protein, 12 aa, SARS-CoV Virus
CHQPFWRVLQHK

SEQ ID NO: 3083 - protein, 18 aa, SARS-CoV Virus
HHLPCKVHPSQGKTYLHL

SEQ ID NO: 3084 - protein, 11 aa, SARS-CoV Virus
ACSENHGKAYH

SEQ ID NO: 3085 - protein, 9 aa, SARS-CoV Virus
YQQTRVTYW

SEQ ID NO: 3086 - protein, 6 aa, SARS-CoV Virus
FLPVLW

SEQ ID NO: 3087 - protein, 6 aa, SARS-CoV Virus
PHQCRP

SEQ ID NO: 3088 - protein, 28 aa, SARS-CoV Virus
FLASHRQASVRQISPQFWNLLCLVAPLV

SEQ ID NO: 3089 - protein, 4 aa, SARS-CoV Virus
VLPL

SEQ ID NO: 3090 - protein, 8 aa, SARS-CoV Virus
ASGYQDNP

SEQ ID NO: 3091 - protein, 9 aa, SARS-CoV Virus
QPAHKELCH

SEQ ID NO: 3092 - protein, 20 aa, SARS-CoV Virus
LQYKPVYEPSARTLVKTEVV

SEQ ID NO: 3093 - protein, 17 aa, SARS-CoV Virus
HQICLLTTMVQVRCPVN

SEQ ID NO: 3094 - protein, 6 aa, SARS-CoV Virus
NFHMLP

SEQ ID NO: 3095 - protein, 10 aa, SARS-CoV Virus
EAGCPHLHLG

SEQ ID NO: 3096 - protein, 8 aa, SARS-CoV Virus
VQQHADTS

SEQ ID NO: 3097 - protein, 13 aa, SARS-CoV Virus
QDYVQKANKTLLL

SEQ ID NO: 3098 - protein, 5 aa, SARS-CoV Virus
EGHLA

SEQ ID NO: 3099 - protein, 15 aa, SARS-CoV Virus
CNHHSPFAWHHWLPC

SEQ ID NO: 3100 - protein, 13 aa, SARS-CoV Virus
VHLLHHHHVSGVC

SEQ ID NO: 3101 - protein, 6 aa, SARS-CoV Virus
QHLQSP

SEQ ID NO: 3102 - protein, 5 aa, SARS-CoV Virus
HFVPP

SEQ ID NO: 3103 - protein, 5 aa, SARS-CoV Virus
RCQHI

SEQ ID NO: 3104 - protein, 5 aa, SARS-CoV Virus
WQHCQ

SEQ ID NO: 3105 - protein, 5 aa, SARS-CoV Virus
VLNNQ

SEQ ID NO: 3106 - protein, 5 aa, SARS-CoV Virus
LVLQV

SEQ ID NO: 3107 - protein, 11 aa, SARS-CoV Virus
VLVLAQSLIAQ

SEQ ID NO: 3108 - protein, 80 aa, SARS-CoV Virus
YHPASLPLLLPQLELFQLRHQIPEGDLDNHPLYRTHVHRFHQFLLPHTLHRPLLPHLEGKRNNTYVMKSFLHQHHQISRM

SEQ ID NO: 3109 - protein, 12 aa, SARS-CoV Virus
LHSTHQDQYPCW

SEQ ID NO: 3110 - protein, 21 aa, SARS-CoV Virus
GDQKLVVKSSQQPLLQHMQTQ

SEQ ID NO: 3111 - protein, 14 aa, SARS-CoV Virus
LRYRIQQCRQSTFH

SEQ ID NO: 3112 - protein, 11 aa, SARS-CoV Virus
ALCQHVHQAQM

SEQ ID NO: 3113 - protein, 20 aa, SARS-CoV Virus
FSHSCNLELPKQYLLQRLHL

SEQ ID NO: 3114 - protein, 12 aa, SARS-CoV Virus
LVHPLLSERHCL

SEQ ID NO: 3115 - protein, 14 aa, SARS-CoV Virus
PVNQETMRSIVLCP

SEQ ID NO: 3116 - protein, 4 aa, SARS-CoV Virus
SLRA

SEQ ID NO: 3117 - protein, 10 aa, SARS-CoV Virus
GHLHRLVCRR

SEQ ID NO: 3118 - protein, 14 aa, SARS-CoV Virus
SYQRASRVLRVHRS

SEQ ID NO: 3119 - protein, 6 aa, SARS-CoV Virus
EQPPQR

SEQ ID NO: 3120 - protein, 17 aa, SARS-CoV Virus
VLCHVNHLQERLLLLVP

SEQ ID NO: 3121 - protein, 20 aa, SARS-CoV Virus
VVAAAPCHVYTDGKVPCFER

SEQ ID NO: 3122 - protein, 5 aa, SARS-CoV Virus
RLHLS

SEQ ID NO: 3123 - protein, 8 aa, SARS-CoV Virus
VIATLRQR

SEQ ID NO: 3124 - protein, 10 aa, SARS-CoV Virus
LDQCTFRVPC

SEQ ID NO: 3125 - protein, 6 aa, SARS-CoV Virus
SILHNP

SEQ ID NO: 3126 - protein, 10 aa, SARS-CoV Virus
CYLKQPVFDP

SEQ ID NO: 3127 - protein, 6 aa, SARS-CoV Virus
RCQKHL

SEQ ID NO: 3128 - protein, 6 aa, SARS-CoV Virus
ESPKHP

SEQ ID NO: 3129 - protein, 6 aa, SARS-CoV Virus
EIQLLH

SEQ ID NO: 3130 - protein, 8 aa, SARS-CoV Virus
VSPQSIQR

SEQ ID NO: 3131 - protein, 4 aa, SARS-CoV Virus
VFQQ

SEQ ID NO: 3132 - protein, 4 aa, SARS-CoV Virus
CPKD

SEQ ID NO: 3133 - protein, 16 aa, SARS-CoV Virus
TTTEKSVVQDHQLHMP

SEQ ID NO: 3134 - protein, 23 aa, SARS-CoV Virus
AGLKYKPWRRQDVMTVQKYHQVW

SEQ ID NO: 3135 - protein, 22 aa, SARS-CoV Virus
QLLFANQELSGLLHQVCAQKLI

SEQ ID NO: 3136 - protein, 31 aa, SARS-CoV Virus
HQQPVRENHTVVLKLISVVQCSKHLLRAFPW

SEQ ID NO: 3137 - protein, 11 aa, SARS-CoV Virus
LYSYRRTQQWF

SEQ ID NO: 3138 - protein, 8 aa, SARS-CoV Virus
KTCNQDSL

SEQ ID NO: 3139 - protein, 7 aa, SARS-CoV Virus
KQRKMPK

SEQ ID NO: 3140 - protein, 13 aa, SARS-CoV Virus
WQPLHSNENRQQC

SEQ ID NO: 3141 - protein, 20 aa, SARS-CoV Virus
HVHDSVSQGDPHSRSPHCHQ

SEQ ID NO: 3142 - protein, 10 aa, SARS-CoV Virus
CQYGLSQYQH

SEQ ID NO: 3143 - protein, 23 aa, SARS-CoV Virus
HEEPSRHAYYSSQHRQTHSLQNI

SEQ ID NO: 3144 - protein, 40 aa, SARS-CoV Virus
SYLPCGVEFQCLSGCDNLQHYAQVQSLGLDRQDMAFSLQH

SEQ ID NO: 3145 - protein, 5 aa, SARS-CoV Virus
VGTHM

SEQ ID NO: 3146 - protein, 31 aa, SARS-CoV Virus
LNFQCHNVHKWLSESRTSAMKLHRNDYISSR

SEQ ID NO: 3147 - protein, 21 aa, SARS-CoV Virus
TSAYCYTPVEMQQGTQSVYAP

SEQ ID NO: 3148 - protein, 12 aa, SARS-CoV Virus
NPQSFSFQHVVE

SEQ ID NO: 3149 - protein, 10 aa, SARS-CoV Virus
EETQTLGIPL

SEQ ID NO: 3150 - protein, 8 aa, SARS-CoV Virus
KCQISWHS

SEQ ID NO: 3151 - protein, 15 aa, SARS-CoV Virus
FRRVSGARSSYQSAQ

SEQ ID NO: 3152 - protein, 39 aa, SARS-CoV Virus
TRQFHAHGHGSSRHLSSTRCNQVVRKECTLTCPRVRENL

SEQ ID NO: 3153 - protein, 18 aa, SARS-CoV Virus
CNQEGTHLGHRNCCRHSE

SEQ ID NO: 3154 - protein, 4 aa, SARS-CoV Virus
LHLH

SEQ ID NO: 3155 - protein, 9 aa, SARS-CoV Virus
VHGVHHCHA

SEQ ID NO: 3156 - protein, 91 aa, SARS-CoV Virus
CSSFVHNLQWDQCQARHLSHKTLDRCHSYDHRLPYYRSYEEEHCGMQLGFRPHVARVLPVLYRYDRTECRPFLQPAQRPCGRDWCLRHQNV

SEQ ID NO: 3157 - protein, 23 aa, SARS-CoV Virus
THRAVQAGAVRLFPALLDHKCHF

SEQ ID NO: 3158 - protein, 22 aa, SARS-CoV Virus
GVHVPPIGPLPQSPRSHALARL

SEQ ID NO: 3159 - protein, 6 aa, SARS-CoV Virus
PEGQAN

SEQ ID NO: 3160 - protein, 7 aa, SARS-CoV Virus
VGRVFSR

SEQ ID NO: 3161 - protein, 47 aa, SARS-CoV Virus
HQEQGSPSYLSVTPGRNLGMLMIDCNTDETVSSLQKRDELLVSCQRQ

SEQ ID NO: 3162 - protein, 22 aa, SARS-CoV Virus
NLLLFILRRCTRHAAERQLHRF

SEQ ID NO: 3163 - protein, 24 aa, SARS-CoV Virus
SSFREQIYKRSRLVGFSWVGKNLI

SEQ ID NO: 3164 - DNA, 14935 bp, Artificial Sequence
  pCV2
  CDS (4)..(14934)
tgagcgtcgcaaaggcgctcggtcttgccttgctcgtcggtgatgtacttcaccagctccgcgaagtcgctcttcttgatggagcgcatggggacgtgcttggcaatcacgcgcaccccccggccgttttagcggctaaaaaagtcatggctctgccctcgggcggaccacgcccatcatgaccttgccaagctcgtcctgcttctcttcgatcttcgccagcagggcgaggatcgtggcatcaccgaaccgcgccgtgcgcgggtcgtcggtgagccagagtttcagcaggccgcccaggcggcccaggtcgccattgatgcgggccagctcgcggacgtgctcatagtccacgacgcccgtgattttgtagccctggccgacggccagcaggtaggccgacaggctcatgccggccgccgccgccttttcctcaatcgctcttcgttcgtctggaaggcagtacaccttgataggtgggctgcccttcctggttggcttggtttcatcagccatccgcttgccctcatctgttacgccggcggtagccggccagcctcgcagagcaggattcccgttgagcaccgccaggtgcgaataagggacagtgaagaaggaacacccgctcgcgggtgggcctacttcacctatcctgcccggctgacgccgttggatacaccaaggaaagtctacacgaaccctttggcaaaatcctgtatatcgtgcgaaaaaggatggatataccgaaaaaatcgctataatgaccccgaagcagggttatgcagcggaaaagcgccacgcttcccgaagggagaaaggcggacaggtatccggtaagcggcagggtcggaacaggagagcgcacgagggagcttccagggggaaacgcctggtatctttatagtcctgtcgggtttcgccacctctgacttgagcgtcgatttttgtgatgctcgtcaggggggcggagcctatggaaaaacgccagcaacgcggcctttttacggttcctggccttttgctggccttttgctcacatgttctttcctgcgttatcccctgattctgtggataaccgtattaccgcctttgagtgagctgataccgctcgccgcagccgaacgaccgagcgcagcgagtcagtgagcgaggaagcggaagagcgccagaaggccgccagagaggccgagcgcggccgtgaggcttggacgctagggcagggcatgaaaaagcccgtagcgggctgctacgggcgtctgacgcggtggaaagggggaggggatgttgtctacatggctctgctgtagtgagtgggttgcgctccggcagcggtcctgatcaatcgtcaccctttctcggtccttcaacgttcctgacaacgagcctccttttcgccaatccatcgacaatcaccgcgagtccctgctcgaacgctgcgtccggaccggcttcgtcgaaggcgtctatcgcggcccgcaacagcggcgagagcggagcctgttcaacggtgccgccgcgctcgccggcatcgctgtcgccggcctgctcctcaagcacggccccaacagtgaagtagctgattgtcatcagcgcattgacggcgtccccggccgaaaaacccgcctcgcagaggaagcgaagctgcgcgtcggccgtttccatctgcggtgcgcccggtcgcgtgccggcatggatgcgcgcgccatcgcggtaggcgagcagcgcctgcctgaagctgcgggcattcccgatcagaaatgagcgccagtcgtcgtcggctctcggcaccgaatgcgtatgattctccgccagcatggcttcggccagtgcgtcgagcagcgcccgcttgttcctgaagtgccagtaaagcgccggctgctgaacccccaaccgttccgccagtttgcgtgtcgtcagaccgtctacgccgacctcgttcaacaggtccagggcggcacggatcactgtattcggctgcaactttgtcatgcttgacactttatcactgataaacataatatgtccaccaacttatcagtgataaagaatccgcgcgttcaatcggaccagcggaggctggtccggaggccagacgtgaaacccaacatacccctgatcgtaattctgagcactgtcgcgctcgacgctgtcggcatcggcctgattatgccggtgctgccgggcctcctgcgcgatctggttcactcgaacgacgtcaccgcccactatggcattctgctggcgctgtatgcgttggtgcaatttgcctgcgcacctgtgctgggcgcgctgtcggatcgtttcgggcggcggccaatcttgctcgtctcgctggccggcgccagatctggggaaccctgtggttggcatgcacatacaaatggacgaacggataaaccttttcacgcccttttaaatatccgattattctaataaacgctcttttctcttaggtttacccgccaatatatcctgtcaaacactgatagtttaaactgaaggcgggaaacgacaatctgatcatgagcggagaattaagggagtcacgttatgacccccgccgatgacgcgggacaagccgttttacgtttggaactgacagaaccgcaacgttgaaggagccactcagccgcgggtttctggagtttaatgagctaagcacatacgtcagaaaccattattgcgcgttcaaaagtcgcctaaggtcactatcagctagcaaatatttcttgtcaaaaatgctccactgacgttccataaattcccctcggtatccaattagagtctcatattcactctcaatccaaataatctgcaccggatctggatcgtttcgcatgattgaacaagatggattgcacgcaggttctccggccgcttgggtggagaggctattcggctatgactgggcacaacagacaatcggctgctctgatgccgccgtgttccggctgtcagcgcaggggcgcccggttctttttgtcaagaccgacctgtccggtgccctgaatgaactgcaggacgaggcagcgcggctatcgtggctggccacgacgggcgttccttgcgcagctgtgctcgacgttgtcactgaagcgggaagggactggctgctattgggcgaagtgccggggcaggatctcctgtcatctcaccttgctcctgccgagaaagtatccatcatggctgatgcaatgcggcggctgcatacgcttgatccggctacctgcccattcgaccaccaagcgaaacatcgcatcgagcgagcacgtactcggatggaagccggtcttgtcgatcaggatgatctggacgaagagcatcaggggctcgcgccagccgaactgttcgccaggctcaaggcgcgcatgcccgacggcgatgatctcgtcgtgacccatggcgatgcctgcttgccgaatatcatggtggaaaatggccgcttttctggattcatcgactgtggccggctgggtgtggcggaccgctatcaggacatagcgttggctacccgtgatattgctgaagagcttggcggcgaatgggctgaccgcttcctcgtgctttacggtatcgccgctcccgattcgcagcgcatcgccttctatcgccttcttgacgagttcttctgagcgggactctggggttcgaaatgaccgaccaagcgacgcccaacctgccatcacgagatttcgattccaccgccgccttctatgaaaggttgggcttcggaatcgttttccgggacgccggctggatgatcctccagcgcggggatctcatgctggagttcttcgcccacgggatctctgcggaacaggcggtcgaaggtgccgatatcattacgacagcaacggccgacaagcacaacgccacgatcctgagcgacaatatgatcgggcccggcgtccacatcaacggcgtcggcggcgactgcccaggcaagaccgagatgcaccgcgatatcttgctgcgttcggatattttcgtggagttcccgccacagacccggatgatccccgatcgttcaaacatttggcaataaagtttcttaagattgaatcctgttgccggtcttgcgatgattatcatataatttctgttgaattacgttaagcatgtaataattaacatgtaatgcatgacgttatttatgagatgggtttttatgattagagtcccgcaattatacatttaatacgcgatagaaaacaaaatatagcgcgcaaactaggataaattatcgcgcgcggtgtcatctatgttactagatcgggcctcctgtcaatgctggcggcggctctggtggtggttctggtggcggctctgagggtggtggctctgagggtggcggttctgagggtggcggctctgagggaggcggttccggtggtggctctggttccggtgattttgattatgaaaagatggcaaacgctaataagggggctatgaccgaaaatgccgatgaaaacgcgctacagtctgacgctaaaggcaaacttgattctgtcgctactgattacggtgctgctatcgatggtttcattggtgacgtttccggccttgctaatggtaatggtgctactggtgattttgctggctctaattcccaaatggctcaagtcggtgacggtgataattcacctttaatgaataatttccgtcaatatttaccttccctccctcaatcggttgaatgtcgcccttttgtctttggcccaatacgcaaaccgcctctccccgcgcgttggccgattcattaatgcagctggcacgacaggtttcccgactggaaagcgggcagtgagcgcaacgcaattaatgtgagttagctcactcattaggcaccccaggctttacactttatgcttccggctcgtatgttgtgtggaattgtgagcggataacaatttcacacaggaaacagctatgaccatgattacgccaagcttgcatgcctgcaggtccccagattagccttttcaatttcagaaagaatgctaacccacagatggttagagaggcttacgcagcaggtctcatcaagacgatctacccgagcaataatctccaggaaatcaaataccttcccaagaaggttaaagatgcagtcaaaagattcaggactaactgcatcaagaacacagagaaagatatatttctcaagatcagaagtactattccagtatggacgattcaaggcttgcttcacaaaccaaggcaagtaatagagattggagtctctaaaaaggtagttcccactgaatcaaaggccatggagtcaaagattcaaatagaggacctaacagaactcgccgtaaagactggcgaacagttcatacagagtctcttacgactcaatgacaagaagaaaatcttcgtcaacatggtggagcacgacacacttgtctactccaaaaatatcaaagatacagtctcagaagaccaaagggcaattgagacttttcaacaaagggtaatatccggaaacctcctcggattccattgcccagctatctgtcactttattgtgaagatagtggaaaaggaaggtggctcctacaaatgccatcattgcgataaaggaaaggccatcgttgaagatgcctctgccgacagtggtcccaaagatggacccccacccacgaggagcatcgtggaaaaagaagacgttccaaccacgtcttcaaagcaagtggattgatgtgatatctccactgacgtaagggatgacgcacaatcccactatccttcgcaagacccttcctctatataaggaagttcatttcatttggagagaacacgggggactctagaggatccatgtttattttcttattatttcttactctcactagtggtagtgaccttgaccggtgcaccacttttgatgatgttcaagctcctaattacactcaacatacttcatctatgaggggggtttactatcctgatgaaatttttagatcagacactctttatttaactcaggatttatttcttccattttattctaatgttacagggtttcatactattaatcatacgtttggcaaccctgtcataccttttaaggatggtatttattttgctgccacagagaaatcaaatgttgtccgtggttgggtttttggttctaccatgaacaacaagtcacagtcggtgattattattaacaattctactaatgttgttatacgagcatgtaactttgaattgtgtgacaaccctttctttgctgtttctaaacccatgggtacacagacacatactatgatattcgataatgcatttaattgcactttcgagtacatatctgatgccttttcgcttgatgtttcagaaaagtcaggtaattttaaacacttacgagagtttgtgtttaaaaataaagatgggtttctctatgtttataagggctatcaacctatagatgtagttcgtgatctaccttctggttttaacactttgaaacctatttttaagttgcctcttggtattaacattacaaattttagagccattcttacagccttttcacctgctcaagacatttggggcacgtcagctgcagcctattttgttggctatttaaagccaactacatttatgctcaagtatgatgaaaatggtacaatcacagatgctgttgattgttctcaaaatccacttgctgaactcaaatgctctgttaagagctttgagattgacaaaggaatttaccagacctctaatttcagggttgttccctcaggagatgttgtgagattccctaatattacaaacttgtgtccttttggagaggtttttaatgctactaaattcccttctgtctatgcatgggagagaaaaaaaatttctaattgtgttgctgattactctgtgctctacaactcaacatttttttcaacctttaagtgctatggcgtttctgccactaagttgaatgatctttgcttctccaatgtctatgcagattcttttgtagtcaagggagatgatgtaagacaaatagcgccaggacaaactggtgttattgctgattataattataaattgccagatgatttcatgggttgtgtccttgcttggaatactaggaacattgatgctacttcaactggtaattataattataaatataggtatcttagacatggcaagcttaggccctttgagagagacatatctaatgtgcctttctcccctgatggcaaaccttgcaccccacctgctcttaattgttattggccattaaatgattatggtttttacaccactactggcattggctaccaaccttacagagttgtagtactttcttttgaacttttaaatgcaccggccacggtttgtggaccaaaattatccactgaccttattaagaaccagtgtgtcaattttaattttaatggactcactggtactggtgtgttaactccttcttcaaagagatttcaaccatttcaacaatttggccgtgatgtttctgatttcactgattccgttcgagatcctaaaacatctgaaatattagacatttcaccttgctcttttgggggtgtaagtgtaattacacctggaacaaatgcttcatctgaagttgctgttctatatcaagatgttaactgcactgatgtttctacagcaattcatgcagatcaactcacaccagcttggcgcatatattctactggaaacaatgtattccagactcaagcaggctgtcttataggagctgagcatgtcgacacttcttatgagtgcgacattcctattggagctggcatttgtgctattaccatacagttagactagaaaagggcgaattctgcagatatccatcacactggcggccgctcgacctcgagggggggcccggtacagctcgaatttccccgatcgttcaaacatttggcaataaagtttcttaagattgaatcctgttgccggtcttgcgatgattatcatataatttctgttgaattacgttaagcatgtaataattaacatgtaatgcatgacgttatttatgagatgggtttttatgattagagtcccgcaattatacatttaatacgcgatagaaaacaaaatatagcgcgcaaactaggataaattatcgcgcgcggtgtcatctatgttactagatcgggaattcactggccgtcgttttacaacgtcgtgactgggaaaaccctggcgttacccaacttaatcgccttgcagcacatccccctttcgccagctggcgtaatagcgaagaggcccgcaccgatcgcccttcccaacagttgcgcagcctgaatggcgcccgctcctttcgctttcttcccttcctttctcgccacgttcgccggctttccccgtcaagctctaaatcgggggctccctttagggttccgatttagtgctttacggcacctcgaccccaaaaaacttgatttgggtgatggttcacgtagtgggccatcgccctgatagacggtttttcgccctttgacgttggagtccacgttctttaatagtggactcttgttccaaactggaacaacactcaaccctatctcgggctattcttttgatttataagggattttgccgatttcggaaccaccatcaaacaggattttcgcctgctggggcaaaccagcgtggaccgcttgctgcaactctctcagggccaggcggtgaagggcaatcagctgttgcccgtctcactggtgaaaagaaaaaccaccccagtacattaaaaacgtccgcaatgtgttattaagttgtctaagcgtcaatttgtttacaccacaatatatcctgccaccagccagccaacagctccccgaccggcagctcggcacaaaatcaccactcgatacaggcagcccatcagtccgggacggcgtcagcgggagagccgttgtaaggcggcagactttgctcatgttaccgatgctattcggaagaacggcaactaagctgccgggtttgaaacacggatgatctcgcggagggtagcatgttgattgtaacgatgacagagcgttgctgcctgtgatcaaatatcatctccctcgcagagatccgaattatcagccttcttattcatttctcgcttaaccgtgacaggctgtcgatcttgagaactatgccgacataataggaaatcgctggataaagccgctgaggaagctgagtggcgctatttctttagaagtgaacgttgacgatatcaactcccctatccattgctcaccgaatggtacaggtcggggacccgaagttccgactgtcggcctgatgcatccccggctgatcgaccccagatctggggctgagaaagcccagtaaggaaacaactgtaggttcgagtcgcgagatcccccggaaccaaaggaagtaggttaaacccgctccgatcaggccgagccacgccaggccgagaacattggttcctgtaggcatcgggattggcggatcaaacactaaagctactggaacgagcagaagtcctccggccgccagttgccaggcggtaaaggtgagcagaggcacgggaggttgccacttgcgggtcagcacggttccgaacgccatggaaaccgcccccgccaggcccgctgcgacgccgacaggatctagcgctgcgtttggtgtcaacaccaacagcgccacgcccgcagttccgcaaatagcccccaggaccgccatcaatcgtatcgggctacctagcagagcggcagagatgaacacgaccatcagcggctgcacagcgcctaccgtcgccgcgaccccgcccggcaggcggtagaccgaaataaacaacaagctccagaatagcgaaatattaagtgcgccgaggatgaagatgcgcatccaccagattcccgttggaatctgtcggacgatcatcacgagcaataaacccgccggcaacgcccgcagcagcataccggcgacccctcggcctcgctgttcgggctccacgaaaacgccggacagatgcgccttgtgagcgtccttggggccgtcctcctgtttgaagaccgacagcccaatgatctcgccgtcgatgtaggcgccgaatgccacggcatctcgcaaccgttcagcgaacgcctccatgggctttttctcctcgtgctcgtaaacggacccgaacatctctggagctttcttcagggccgacaatcggatctcgcggaaatcctgcacgtcggccgctccaagccgtcgaatctgagccttaatcacaattgtcaattttaatcctctgtttatcggcagttcgtagagcgcgccgtgcgtcccgagcgatactgagcgaagcaagtgcgtcgagcagtgcccgcttgttcctgaaatgccagtaaagcgctggctgctgaacccccagccggaactgaccccacaaggccctagcgtttgcaatgcaccaggtcatcattgacccaggcgtgttccaccaggccgctgcctcgcaactcttcgcaggcttcgccgacctgctcgcgccacttcttcacgcgggtggaatccgatccgcacatgaggcggaaggtttccagcttgagcgggtacggctcccggtgcgagctgaaatagtcgaacatccgtcgggccgtcggcgacagcttgcggtacttctcccatatgaatttcgtgtagtggtcgccagcaaacagcacgacgatttcctcgtcgatcaggacctggcaacgggacgttttcttgccacggtccaggacgcggaagcggtgcagcagcgacaccgattccaggtgcccaacgcggtcggacgtgaagcccatcgccgtcgcctgtaggcgcgacaggcattcctcggccttcgtgtaataccggccattgatcgaccagcccaggtcctggcaaagctcgtagaacgtgaaggtgatcggctcgccgataggggtgcgcttcgcgtactccaacacctgctgccacaccagttcgtcatcgtcggcccgcagctcgacgccggtgtaggtgatcttcacgtccttgttgacgtggaaaatgaccttgttttgcagcgcctcgcgcgggattttcttgttgcgcgtggtgaacagggcagagcgggccgtgtcgtttggcatcgctcgcatcgtgtccggccacggcgcaatatcgaacaaggaaagctgcatttccttgatctgctgcttcgtgtgtttcagcaacgcggcctgcttggcctcgctgacctgttttgccaggtcctcgccggcggtttttcgcttcttggtcgtcatagttcctcgcgtgtcgatggtcatcgacttcgccaaacctgccgcctcctgttcgagacgacgcgaacgctccacggcggccgatggcgcgggcagggcagggggagccagttgcacgctgtcgcgctcgatcttggccgtagcttgctggaccatcgagccgacggactggaaggtttcgcggggcgcacgcatgacggtgcggcttgcgatggtttcggcatcctcggcggaaaaccccgcgtcgatcagttcttgcctgtatgccttccggtcaaacgtccgattcattcaccctccttgcgggattgccccgactcacgccggggcaatgtgcccttattcctgatttgacccgcctggtgccttggtgtccagataatccaccttatcggcaatgaagtcggtcccgtagaccgtctggccgtccttctcgtacttggtattccgaatcttgccctgcacgaataccagcgaccccttgcccaaatacttgccgtgggcctcggcctgagagccaaaacacttgatgcggaagaagtcggtgcgctcctgcttgtcgccggcatcgttgcgccacatctaggtactaaaacaattcatccagtaaaatataatattttattttctcccaatcaggcttgatccccagtaagtcaaaaaatagctcgacatactgttcttccccgatatcctccctgatcgaccggacgcagaaggcaatgtcataccacttgtccgccctgccgcttctcccaagatcaataaagccacttactttgccatctttcacaaagatgttgctgtctcccaggtcgccgtgggaaaagacaagttcctcttcgggcttttccgtctttaaaaaatcatacagctcgcgcggatctttaaatggagtgtcttcttcccagttttcgcaatccacatcggccagatcgttattcagtaagtaatccaattcggctaagcggctgtctaagctattcgtatagggacaatccgatatgtcgatggagtgaaagagcctgatgcactccgcatacagctcgataatcttttcagggctttgttcatcttcatactcttccgagcaaaggacgccatcggcctcactcatgagcagattgctccagccatcatgccgttcaaagtgcaggacctttggaacaggcagctttccttccagccatagcatcatgtccttttcccgttccacatcataggtggtccctttataccggctgtccgtcatttttaaatataggttttcattttctcccaccagcttatataccttagcaggagacattccttccgtatcttttacgcagcggtatttttcgatcagttttttcaattccggtgatattctcattttagccatttattatttccttcctcttttctacagtatttaaagataccccaagaagctaattataacaagacgaactccaattcactgttccttgcattctaaaaccttaaataccagaaaacagctttttcaaagttgttttcaaagttggcgtataacatagtatcgacggagccgattttgaaaccacaattatgggtgatgctgccaacttactgatttagtgtatgatggtgtttttgaggtgctccagtggcttctgtgtctatcagctgtccctcctgttcagctactgacggggtggtgcgtaacggcaaaagcaccgccggacatcagcgctatctctgctctcactgccgtaaaacatggcaactgcagttcacttacaccgcttctcaacccggtacgcaccagaaaatcattgatatggccatgaatggcgttggatgccgggcaacagcccgcattatgggcgttggcctcaacacgattttacgtcacttaaaaaactcaggccgcagtcggtaacctcgcgcatacagccgggcagtgacgtcatcgtctgcgcggaaatggacgaacagtggggctatgtcggggctaaatcgcgccagcgctggctgttttacgcgtatgacagtctccggaagacggttgttgcgcacgtattcggtgaacgcactatggcgacgctggggcgtcttatgagcctgctgtcaccctttgacgtggtgatatggatgacggatggctggccgctgtatgaatcccgcctgaagggaaagctgcacgtaatcagcaagcgatatacgcagcgaattgagcggcataacctgaatctgaggcagcacctggcacggctgggacggaagtcgctgtcgttctcaaaatcggtggagctgcatgacaaagtcatcgggcattatctgaacataaaacactatcaataagttggagtcattacccaattatgatagaatttacaagctataaggttattgtcctgggtttcaagcattagtccatgcaagtttttatgctttgcccattctatagatatattgataagcgcgctgcctatgccttgccccctgaaatccttacatacggcgatatcttctatataaaagatatattatcttatcagtattgtcaatatattcaaggcaatctgcctcctcatcctcttcatcctcttcgtcttggtagctttttaaatatggcgcttcatagagtaattctgtaaaggtccaattctcgttttcatacctcggtataatcttacctatcacctcaaatggttcgctgggtttatcgcacccccgaacacgagcacggcacccgcgaccactatgccaagaatgcccaaggtaaaaattgccggccccgccatgaagtccgtgaatgccccgacggccgaagtgaagggcaggccgccacccaggccgccgccctcactgcccggcacctggtcgctgaatgtcgatgccagcacctgcggcacgtcaatgcttccgggcgtcgcgctcgggctgatcgcccatcccgttactgccccgatcccggcaatggcaaggactgccagcgctgccatttttggggtgaggccgttcgcggccgaggggcgcagcccctggggggatgggaggcccgcgttagcgggccgggagggttcgagaagggggggcaccccccttcggcgtgcgcggtcacgcgcacagggcgcagccctggttaaaaacaaggtttataaatattggtttaaaagcaggttaaaagacaggttagcggtggccgaaaaacgggcggaaacccttgcaaatgctggattttctgcctgtggacagcccctcaaatgtcaataggtgcgcccctcatctgtcagcactctgcccctcaagtgtcaaggatcgcgcccctcatctgtcagtagtcgcgcccctcaagtgtcaataccgcagggcacttatccccaggcttgtccacatcatctgtgggaaactcgcgtaaaatcaggcgttttcgccgatttgcgaggctggccagctccacgtcgccggccgaaatcgagcctgcccctcatctgtcaacgccgcgccgggtgagtcggcccctcaagtgtcaacgtccgcccctcatctgtcagtgagggccaagttttccgcgaggtatccacaacgccggcggccgcggtgtctcgcacacggcttcgacggcgtttctggcgcgtttgcagggccatagacggccgccagcccagcggcgagggcaaccagcccgg

SEQ ID NO: 3165 - protein, 42 aa, Artificial Sequence
  pCV2
ASQRRSVLPCSSVMYFTSSAKSLFLMERMGTCLAITRTPRPF

SEQ ID NO: 3166 - protein, 234 aa, Artificial Sequence
  pCV2
RLKKSWLCPRADHAHHDLAKLVLLLFDLRQQGEDRGITEPRRARVVGEPEFQQAAQAAQVAIDAGQLADVLIVHDARDFVALADGQQVGRQAHAGRRRLFLNRSSFVWKAVHLDRWAALPGWLGFISHPLALICYAGGSRPASQSRIPVEHRQVRIRDSEEGTPARGWAYFTYPARLTPLDTPRKVYTNPLAKSCISCEKGWIYRKNRYNDPEAGLCSGKAPRFPKGERRTGIR

SEQ ID NO: 3167 - protein, 102 aa, Artificial Sequence
  pCV2
AAGSEQESARGSFQGETPGIFIVLSGFATSDLSVDFCDARQGGGAYGKTPATRPFYGSWPFAGLLLTCSFLRYPLILWITVLPPLSELIPLAAAERPSAASQ

SEQ ID NO: 3168 - protein, 22 aa, Artificial Sequence
  pCV2
ARKRKSARRPPERPSAAVRLGR

SEQ ID NO: 3169 - protein, 6 aa, Artificial Sequence
  pCV2
RAATGV

SEQ ID NO: 3170 - protein, 25 aa, Artificial Sequence
  pCV2
RGGKGEGMLSTWLCCSEWVALRQRS

SEQ ID NO: 3171 - protein, 140 aa, Artificial Sequence
  pCV2
SIVTLSRSFNVPDNEPPFRQSIDNHRESLLERCVRTGFVEGVYRGPQQRRERSLFNGAAALAGIAVAGLLLKHGPNSEVADCHQRIDGVPGRKTRLAEEAKLRVGRFHLRCARSRAGMDARAIAVGEQRLPEAAGIPDQK

SEQ ID NO: 3172 - protein, 77 aa, Artificial Sequence
  pCV2
APVVVGSRHRMRMILRQHGFGQCVEQRPLVPEVPVKRRLLNPQPFRQFACRQTVYADLVQQVQGGTDHCIRLQLCHA

SEQ ID NO: 3173 - protein, 145 aa, Artificial Sequence
  pCV2
HFITDKHNMSTNLSVIKNPRVQSDQRRLVRRPDVKPNIPLIVILSTVALDAVGIGLIMPVLPGLLRDLVHSNDVTAHYGILLALYALVQFACAPVLGALSDRFGRRPILLVSLAGARSGEPCGWHAHTNGRTDKPFHALLNIRLF

SEQ ID NO: 3174 - protein, 20 aa, Artificial Sequence
  pCV2
TLFSLRFTRQYILSNTDSLN

SEQ ID NO: 3175 - protein, 6 aa, Artificial Sequence
  pCV2
RRETTI

SEQ ID NO: 3176 - protein, 25 aa, Artificial Sequence
  pCV2
GSHVMTPADDAGQAVLRLELTEPQR

SEQ ID NO: 3177 - protein, 13 aa, Artificial Sequence
  pCV2
RSHSAAGFWSLMS

SEQ ID NO: 3178 - protein, 14 aa, Artificial Sequence
  pCV2
AHTSETIIARSKVA

SEQ ID NO: 3179 - protein, 18 aa, Artificial Sequence
  pCV2
GHYQLANISCQKCSTDVP

SEQ ID NO: 3180 - protein, 16 aa, Artificial Sequence
  pCV2
IPLGIQLESHIHSQSK

SEQ ID NO: 3181 - protein, 9 aa, Artificial Sequence
  pCV2
SAPDLDRFA

SEQ ID NO: 3182 - protein, 55 aa, Artificial Sequence
  pCV2
LNKMDCTQVLRPLGWRGYSAMTGHNRQSAALMPPCSGCQRRGARFFLSRPTCPVP

SEQ ID NO: 3183 - protein, 128 aa, Artificial Sequence
  pCV2
MNCRTRQRGYRGWPRRAFLAQLCSTLSLKREGTGCYWAKCRGRISCHLTLLLPRKYPSWLMQCGGCIRLIRLPAHSTTKRNIASSEHVLGWKPVLSIRMIWTKSIRGSRQPNCSPGSRRACPTAMISS

SEQ ID NO: 3184 - protein, 34 aa, Artificial Sequence
  pCV2
PMAMPACRISWWKMAAFLDSSTVAGWVWRTAIRT

SEQ ID NO: 3185 - protein, 71 aa, Artificial Sequence
  pCV2
RWLPVILLKSLAANGLTASSCFTVSPLPIRSASPSIAFLTSSSERDSGVRNDRPSDAQPAITRFRFHRRLL

SEQ ID NO: 3186 - protein, 132 aa, Artificial Sequence
  pCV2
KVGLRNRFPGRRLDDPPARGSHAGVLRPRDLCGTGGRRCRYHYDSNGRQAQRHDPERQYDRARRPHQRRRRRLPRQDRDAPRYLAAFGYFRGVPATDPDDPRSFKHLAIKFLKIESCCRSCDDYHIISVELR

SEQ ID NO: 3187 - protein, 4 aa, Artificial Sequence
  pCV2
ACNN

SEQ ID NO: 3188 - protein, 14 aa, Artificial Sequence
  pCV2
HVMHDVIYEMGFYD

SEQ ID NO: 3189 - protein, 20 aa, Artificial Sequence
  pCV2
SPAIIHLIRDRKQNIARKLG

SEQ ID NO: 3190 - protein, 71 aa, Artificial Sequence
  pCV2
IIARGVIYVTRSGLLSMLAAALVVVLVAALRVVALRVAVLRVAALREAVPVVALVPVILIMKRWQTLIRGL

SEQ ID NO: 3191 - protein, 65 aa, Artificial Sequence
  pCV2
PKMPMKTRYSLTLKANLILSLLITVLLSMVSLVTFPALLMVMVLLVILLALIPKWLKSVTVIIHL

SEQ ID NO: 3192 - protein, 57 aa, Artificial Sequence
  pCV2
IISVNIYLPSLNRLNVALLSLAQYANRLSPRVGRFINAAGTTGFPTGKRAVSATQLM

SEQ ID NO: 3193 - protein, 23 aa, Artificial Sequence
  pCV2
VSSLIRHPRLYTLCFRLVCCVEL

SEQ ID NO: 3194 - protein, 25 aa, Artificial Sequence
  pCV2
ADNNFTQETAMTMITPSLHACRSPD

SEQ ID NO: 3195 - protein, 8 aa, Artificial Sequence
  pCV2
PFQFQKEC

SEQ ID NO: 3196 - protein, 4 aa, Artificial Sequence
  pCV2
PTDG

SEQ ID NO: 3197 - protein, 15 aa, Artificial Sequence
  pCV2
RGLRSRSHQDDLPEQ

SEQ ID NO: 3198 - protein, 11 aa, Artificial Sequence
  pCV2
SPGNQIPSQEG

SEQ ID NO: 3199 - protein, 8 aa, Artificial Sequence
  pCV2
RCSQKIQD

SEQ ID NO: 3200 - protein, 38 aa, Artificial Sequence
  pCV2
LHQEHRERYISQDQKYYSSMDDSRLASQTKASNRDWSL

SEQ ID NO: 3201 - protein, 5 aa, Artificial Sequence
  pCV2
KGSSH

SEQ ID NO: 3202 - protein, 32 aa, Artificial Sequence
  pCV2
IKGHGVKDSNRGPNRTRRKDWRTVHTESLTTQ

SEQ ID NO: 3203 - protein, 31 aa, Artificial Sequence
  pCV2
QEENLRQHGGARHTCLLQKYQRYSLRRPKGN

SEQ ID NO: 3204 - protein, 40 aa, Artificial Sequence
  pCV2
DFSTKGNIRKPPRIPLPSYLSLYCEDSGKGRWLLQMPSLR

SEQ ID NO: 3205 - protein, 5 aa, Artificial Sequence
  pCV2
RKGHR

SEQ ID NO: 3206 - protein, 35 aa, Artificial Sequence
  pCV2
RCLCRQWSQRWTPTHEEHRGKRRRSNHVFKASGLM

SEQ ID NO: 3207 - protein, 694 aa, Artificial Sequence
  pCV2
RTIPLSFARPFLYIRKFISFGENTGDSRGSMFIFLLFLTLTSGSDLDRCTTFDDVQAPNYTQHTSSMRGVYYPDEIFRSDTLYLTQDLFLPFYSNVTGFHTINHTFGNPVIPFKDGIYFAATEKSNVVRGWVFGSTMNNKSQSVIIINNSTNVVIRACNFELCDNPFFAVSKPMGTQTHTMIFDNAFNCTFEYISDAFSLDVSEKSGNFKHLREFVFKNKDGFLYVYKGYQPIDVVRDLPSGFNTLKPIFKLPLGINITNFRAILTAFSPAQDIWGTSAAAYFVGYLKPTTFMLKYDENGTITDAVDCSQNPLAELKCSVKSFEIDKGIYQTSNFRVVPSGDVVRFPNITNLCPFGEVFNATKFPSVYAWERKKISNCVADYSVLYNSTFFSTFKCYGVSATKLNDLCFSNVYADSFVVKGDDVRQIAPGQTGVIADYNYKLPDDFMGCVLAWNTRNIDATSTGNYNYKYRYLRHGKLRPFERDISNVPFSPDGKPCTPPALNCYWPLNDYGFYTTTGIGYQPYRVVVLSFELLNAPATVCGPKLSTDLIKNQCVNFNFNGLTGTGVLTPSSKRFQPFQQFGRDVSDFTDSVRDPKTSEILDISPCSFGGVSVITPGTNASSEVAVLYQDVNCTDVSTAIHADQLTPAWRIYSTGNNVFQTQAGCLIGAEHVDTSYECDIPIGAGICAITIQLD

SEQ ID NO: 3208 - protein, 58 aa, Artificial Sequence
  pCV2
KRANSADIHHTGGRSTSRGGPVQLEFPRSFKHLAIKFLKIESCCRSCDDYHIISVELR

SEQ ID NO: 3209 - protein, 4 aa, Artificial Sequence
  pCV2
ACNN

SEQ ID NO: 3210 - protein, 14 aa, Artificial Sequence
  pCV2
HVMHDVIYEMGFYD

SEQ ID NO: 3211 - protein, 20 aa, Artificial Sequence
  pCV2
SPAIIHLIRDRKQNIARKLG

SEQ ID NO: 3212 - protein, 62 aa, Artificial Sequence
  pCV2
IIARGVIYVTRSGIHWPSFYNVVTGKTLALPNLIALQHIPLSPAGVIAKRPAPIALPNSCAA

SEQ ID NO: 3213 - protein, 57 aa, Artificial Sequence
  pCV2
MAPAPFAFFPSFLATFAGFPRQALNRGLPLGFRFSALRHLDPKKLDLGDGSRSGPSP

SEQ ID NO: 3214 - protein, 35 aa, Artificial Sequence
  pCV2
TVFRPLTLESTFFNSGLLFQTGTTLNPISGYSFDL

SEQ ID NO: 3215 - protein, 33 aa, Artificial Sequence
  pCV2
GILPISEPPSNRIFACWGKPAWTACCNSLRARR

SEQ ID NO: 3216 - protein, 10 aa, Artificial Sequence
  pCV2
RAISCCPSHW

SEQ ID NO: 3217 - protein, 90 aa, Artificial Sequence
  pCV2
KEKPPQYIKNVRNVLLSCLSVNLFTPQYILPPASQQLPDRQLGTKSPLDTGSPSVRDGVSGRAVVRRQTLLMLPMLFGRTATKLPGLKHG

SEQ ID NO: 3218 - protein, 4 aa, Artificial Sequence
  pCV2
SRGG

SEQ ID NO: 3219 - protein, 33 aa, Artificial Sequence
  pCV2
HVDCNDDRALLPVIKYHLPRRDPNYQPSYSFLA

SEQ ID NO: 3220 - protein, 74 aa, Artificial Sequence
  pCV2
QAVDLENYADIIGNRWIKPLRKLSGAISLEVNVDDINSPIHCSPNGTGRGPEVPTVGLMHPRLIDPRSGAEKAQ

SEQ ID NO: 3221 - protein, 18 aa, Artificial Sequence
  pCV2
GNNCRFESRDPPEPKEVG

SEQ ID NO: 3222 - protein, 26 aa, Artificial Sequence
  pCV2
TRSDQAEPRQAENIGSCRHRDWRIKH

SEQ ID NO: 3223 - protein, 50 aa, Artificial Sequence
  pCV2
SYWNEQKSSGRQLPGGKGEQRHGRLPLAGQHGSERHGNRPRQARCDADRI

SEQ ID NO: 3224 - protein, 29 aa, Artificial Sequence
  pCV2
RCVWCQHQQRHARSSANSPQDRHQSYRAT

SEQ ID NO: 3225 - protein, 35 aa, Artificial Sequence
  pCV2
QSGRDEHDHQRLHSAYRRRDPARQAVDRNKQQAPE

SEQ ID NO: 3226 - protein, 27 aa, Artificial Sequence
  pCV2
RNIKCAEDEDAHPPDSRWNLSDDHHEQ

SEQ ID NO: 3227 - protein, 114 aa, Artificial Sequence
  pCV2
TRRQRPQQHTGDPSASLFGLHENAGQMRLVSVLGAVLLFEDRQPNDLAVDVGAECHGISQPFSERLHGLFLLVLVNGPEHLWSFLQGRQSDLAEILHVGRSKPSNLSLNHNCQF

SEQ ID NO: 3228 - protein, 17 aa, Artificial Sequence
  pCV2
SSVYRQFVERAVRPERY

SEQ ID NO: 3229 - protein, 12 aa, Artificial Sequence
  pCV2
AKQVRRAVPACS

SEQ ID NO: 3230 - protein, 19 aa, Artificial Sequence
  pCV2
NASKALAAEPPAGTDPTRP

SEQ ID NO: 3231 - protein, 60 aa, Artificial Sequence
  pCV2
RLQCTRSSLTQACSTRPLPRNSSQASPTCSRHFFTRVESDPHMRRKVSSLSGYGSRCELK

SEQ ID NO: 3232 - protein, 20 aa, Artificial Sequence
  pCV2
SNIRRAVGDSLRYFSHMNFV

SEQ ID NO: 3233 - protein, 62 aa, Artificial Sequence
  pCV2
WSPANSTTISSSIRTWQRDVFLPRSRTRKRCSSDTDSRCPTRSDVKPIAVACRRDRHSSAFV

SEQ ID NO: 3234 - protein, 14 aa, Artificial Sequence
  pCV2
YRPLIDQPRSWQSS

SEQ ID NO: 3235 - protein, 34 aa, Artificial Sequence
  pCV2
NVKVIGSPIGVRFAYSNTCCHTSSSSSARSSTPV

SEQ ID NO: 3236 - protein, 205 aa, Artificial Sequence
  pCV2
VIFTSLLTWKMTLFCSASRGIFLLRVVNRAERAVSFGIARIVSGHGAISNKESCISLICCFVCFSNAACLASLTCFARSSPAVFRFLVVIVPRVSMVIDFAKPAASCSRRRERSTAADGAGRAGGASCTLSRSILAVACWTIEPTDWKVSRGARMTVRLAMVSASSAENPASISSCLYAFRSNVRFIHPPCGIAPTHAGAMCPYS

SEQ ID NO: 3237 - protein, 10 aa, Artificial Sequence
  pCV2
FDPPGALVSR

SEQ ID NO: 3238 - protein, 10 aa, Artificial Sequence
  pCV2
STLSAMKSVP

SEQ ID NO: 3239 - protein, 32 aa, Artificial Sequence
  pCV2
TVWPSFSYLVFRILPCTNTSDPLPKYLPWASA

SEQ ID NO: 3240 - protein, 23 aa, Artificial Sequence
  pCV2
EPKHLMRKKSVRSCLSPASLRHI

SEQ ID NO: 3241 - protein, 7 aa, Artificial Sequence
  pCV2
VLKQFIQ

SEQ ID NO: 3242 - protein, 14 aa, Artificial Sequence
  pCV2
NIIFYFLPIRLDPQ

SEQ ID NO: 3243 - protein, 64 aa, Artificial Sequence
  pCV2
LDILFFPDILPDRPDAEGNVIPLVRPAASPKINKATYFAIFHKDVAVSQVAVGKDKFLFGLFRL

SEQ ID NO: 3244 - protein, 28 aa, Artificial Sequence
  pCV2
KIIQLARIFKWSVFFPVFAIHIGQIVIQ

SEQ ID NO: 3245 - protein, 5 aa, Artificial Sequence
  pCV2
VIQFG

SEQ ID NO: 3246 - protein, 70 aa, Artificial Sequence
  pCV2
AIRIGTIRYVDGVKEPDALRIQLDNLFRALFIFILFRAKDAIGLTHEQIAPAIMPFKVQDLWNRQLSFQP

SEQ ID NO: 3247 - protein, 21 aa, Artificial Sequence
  pCV2
HHVLFPFHIIGGPFIPAVRHF

SEQ ID NO: 3248 - protein, 33 aa, Artificial Sequence
  pCV2
VFIFSHQLIYLSRRHSFRIFYAAVFFDQFFQFR

SEQ ID NO: 3249 - protein, 37 aa, Artificial Sequence
  pCV2
YSHFSHLLFPSSFLQYLKIPQEANYNKTNSNSLFLAF

SEQ ID NO: 3250 - protein, 38 aa, Artificial Sequence
  pCV2
NLKYQKTAFSKLFSKLAYNIVSTEPILKPQLWVMLPTY

SEQ ID NO: 3251 - protein, 94 aa, Artificial Sequence
  pCV2
GAPVASVSISCPSCSATDGVVRNGKSTAGHQRYLCSHCRKTWQLQFTYTASQPGTHQKIIDMAMNGVGCRATARIMGVGLNTILRHLKNSGRSR

SEQ ID NO: 3252 - protein, 59 aa, Artificial Sequence
  pCV2
PRAYSRAVTSSSARKWTNSGAMSGLNRASAGCFTRMTVSGRRLLRTYSVNALWRRWGVL

SEQ ID NO: 3253 - protein, 8 aa, Artificial Sequence
  pCV2
ACCHPLTW

SEQ ID NO: 3254 - protein, 10 aa, Artificial Sequence
  pCV2
RMAGRCMNPA

SEQ ID NO: 3255 - protein, 5 aa, Artificial Sequence
  pCV2
RESCT

SEQ ID NO: 3256 - protein, 13 aa, Artificial Sequence
  pCV2
SASDIRSELSGIT

SEQ ID NO: 3257 - protein, 28 aa, Artificial Sequence
  pCV2
GSTWHGWDGSRCRSQNRWSCMTKSSGII

SEQ ID NO: 3258 - protein, 18 aa, Artificial Sequence
  pCV2
NTINKLESLPNYDRIYKL

SEQ ID NO: 3259 - protein, 20 aa, Artificial Sequence
  pCV2
GYCPGFQALVHASFYALPIL

SEQ ID NO: 3260 - protein, 8 aa, Artificial Sequence
  pCV2
ARCLCLAP

SEQ ID NO: 3261 - protein, 37 aa, Artificial Sequence
  pCV2
NPYIRRYLLYKRYIILSVLSIYSRQSASSSSSSSSSW

SEQ ID NO: 3262 - protein, 7 aa, Artificial Sequence
  pCV2
LFKYGAS

SEQ ID NO: 3263 - protein, 46 aa, Artificial Sequence
  pCV2
SNSVKVQFSFSYLGIILPITSNGSLGLSHPRTRARHPRPLCQECPR

SEQ ID NO: 3264 - protein, 6 aa, Artificial Sequence
  pCV2
KLPAPP

SEQ ID NO: 3265 - protein, 6 aa, Artificial Sequence
  pCV2
MPRRPK

SEQ ID NO: 3266 - protein, 17 aa, Artificial Sequence
  pCV2
RAGRHPGRRPHCPAPGR

SEQ ID NO: 3267 - protein, 18 aa, Artificial Sequence
  pCV2
MSMPAPAARQCFRASRSG

SEQ ID NO: 3268 - protein, 22 aa, Artificial Sequence
  pCV2
SPIPLLPRSRQWQGLPALPFLG

SEQ ID NO: 3269 - protein, 17 aa, Artificial Sequence
  pCV2
GRSRPRGAAPGGMGGPR

SEQ ID NO: 3270 - protein, 38 aa, Artificial Sequence
  pCV2
RAGRVREGGAPPFGVRGHAHRAQPWLKTRFINIGLKAG

SEQ ID NO: 3271 - protein, 73 aa, Artificial Sequence
  pCV2
RWPKNGRKPLQMLDFLPVDSPSNVNRCAPHLSALCPSSVKDRAPHLSVVAPLKCQYRRALIPRLVHIICGKLA

SEQ ID NO: 3272 - protein, 77 aa, Artificial Sequence
  pCV2
NQAFSPICEAGQLHVAGRNRACPSSVNAAPGESAPQVSTSAPHLSVRAKFSARYPQRRRPRCLAHGFDGVSGAFAGP

SEQ ID NO: 3273 - protein, 12 aa, Artificial Sequence
  pCV2
TAASPAARATSP

SEQ ID NO: 3274 - DNA, 14935 bp, Artificial Sequence; identical to SEQ ID NO: 3164
  pCV2
  CDS (2)..(14935)

SEQ ID NO: 3275 - protein, 13 aa, Artificial Sequence
  pCV2
ERRKGARSCLARR

SEQ ID NO: 3276 - protein, 11 aa, Artificial Sequence
  pCV2
CTSPAPRSRSS

SEQ ID NO: 3277 - protein, 19 aa, Artificial Sequence
  pCV2
WSAWGRAWQSRAPPGRFSG

SEQ ID NO: 3278 - protein, 69 aa, Artificial Sequence
  pCV2
KSHGSALGRTTPIMTLPSSSCFSSIFASRARIVASPNRAVRGSSVSQSFSRPPRRPRSPLMRASSRTCS

SEQ ID NO: 3279 - protein, 7 aa, Artificial Sequence
  pCV2
STTPVIL

SEQ ID NO: 3280 - protein, 7 aa, Artificial Sequence
  pCV2
PWPTASR

SEQ ID NO: 3281 - protein, 67 aa, Artificial Sequence
  pCV2
ADRLMPAAAAFSSIALRSSGRQYTLIGGLPFLVGLVSSAIRLPSSVTPAVAGQPRRAGFPLSTARCE

SEQ ID NO: 3282 - protein, 20 aa, Artificial Sequence
  pCV2
GTVKKEHPLAGGPTSPILPG

SEQ ID NO: 3283 - protein, 79 aa, Artificial Sequence
  pCV2
RRWIHQGKSTRTLWQNPVYRAKKDGYTEKIAIMTPKQGYAAEKRHASRREKGGQVSGKRQGRNRRAHEGASRGKRLVSL

SEQ ID NO: 3284 - protein, 9 aa, Artificial Sequence
  pCV2
SCRVSPPLT

SEQ ID NO: 3285 - protein, 42 aa, Artificial Sequence
  pCV2
ASIFVMLVRGAEPMEKRQQRGLFTVPGLLLAFCSHVLSCVIP

SEQ ID NO: 3286 - protein, 5 aa, Artificial Sequence
  pCV2
PYYRL

SEQ ID NO: 3287 - protein, 32 aa, Artificial Sequence
  pCV2
YRSPQPNDRAQRVSERGSGRAPEGRQRGRARP

SEQ ID NO: 3288 - protein, 124 aa, Artificial Sequence
  pCV2
GLDARAGHEKARSGLLRASDAVERGRGCCLHGSAVVSGLRSGSGPDQSSPFLGPSTFLTTSLLFANPSTITASPCSNAASGPASSKASIAARNSGESGACSTVPPRSPASLSPACSSSTAPTVK

SEQ ID NO: 3289 - protein, 45 aa, Artificial Sequence
  pCV2
LIVISALTASPAEKPASQRKRSCASAVSICGAPGRVPAWMRAPSR

SEQ ID NO: 3290 - protein, 28 aa, Artificial Sequence
  pCV2
ASSACLKLRAFPIRNERQSSSALGTECV

SEQ ID NO: 3291 - protein, 21 aa, Artificial Sequence
  pCV2
FSASMASASASSSARLFLKCQ

SEQ ID NO: 3292 - protein, 4 aa, Artificial Sequence
  pCV2
SAGC

SEQ ID NO: 3293 - protein, 52 aa, Artificial Sequence
  pCV2
TPNRSASLRVVRPSTPTSFNRSRAARITVFGCNFVMLDTLSLINIICPPTYQ

SEQ ID NO: 3294 - protein, 17 aa, Artificial Sequence
  pCV2
RIRAFNRTSGGWSGGQT

SEQ ID NO: 3295 - protein, 5 aa, Artificial Sequence
  pCV2
NPTYP

SEQ ID NO: 3296 - protein, 11 aa, Artificial Sequence
  pCV2
ALSRSTLSASA

SEQ ID NO: 3297 - protein, 83 aa, Artificial Sequence
  pCV2
LCRCCRASCAIWFTRTTSPPTMAFCWRCMRWCNLPAHLCWARCRIVSGGGQSCSSRWPAPDLGNPVVGMHIQMDERINLFTPF

SEQ ID NO: 3298 - protein, 25 aa, Artificial Sequence
  pCV2
ISDYSNKRSFLLGLPANISCQTLIV

SEQ ID NO: 3299 - protein, 19 aa, Artificial Sequence
  pCV2
TEGGKRQSDHERRIKGVTL

SEQ ID NO: 3300 - protein, 14 aa, Artificial Sequence
  pCV2
PPPMTRDKPFYVWN

SEQ ID NO: 3301 - protein, 16 aa, Artificial Sequence
  pCV2
QNRNVEGATQPRVSGV

SEQ ID NO: 3302 - protein, 21 aa, Artificial Sequence
  pCV2
AKHIRQKPLLRVQKSPKVTIS

SEQ ID NO: 3303 - protein, 20 aa, Artificial Sequence
  pCV2
QIFLVKNAPLTFHKFPSVSN

SEQ ID NO: 3304 - protein, 20 aa, Artificial Sequence
  pCV2
SLIFTLNPNNLHRIWIVSHD

SEQ ID NO: 3305 - protein, 19 aa, Artificial Sequence
  pCV2
TRWIARRFSGRLGGEAIRL

SEQ ID NO: 3306 - protein, 9 aa, Artificial Sequence
  pCV2
LGTTDNRLL

SEQ ID NO: 3307 - protein, 25 aa, Artificial Sequence
  pCV2
CRRVPAVSAGAPGSFCQDRPVRCPE

SEQ ID NO: 3308 - protein, 26 aa, Artificial Sequence
  pCV2
TAGRGSAAIVAGHDGRSLRSCARRCH

SEQ ID NO: 3309 - protein, 31 aa, Artificial Sequence
  pCV2
SGKGLAAIGRSAGAGSPVISPCSCRESIHHG

SEQ ID NO: 3310 - protein, 8 aa, Artificial Sequence
  pCV2
CNAAAAYA

SEQ ID NO: 3311 - protein, 29 aa, Artificial Sequence
  pCV2
SGYLPIRPPSETSHRASTYSDGSRSCRSG

SEQ ID NO: 3312 - protein, 25 aa, Artificial Sequence
  pCV2
SGRRASGARASRTVRQAQGAHARRR

SEQ ID NO: 3313 - protein, 43 aa, Artificial Sequence
  pCV2
SRRDPWRCLLAEYHGGKWPLFWIHRLWPAGCGGPLSGHSVGYP

SEQ ID NO: 3314 - protein, 7 aa, Artificial Sequence
  pCV2
RAWRRMG

SEQ ID NO: 3315 - protein, 22 aa, Artificial Sequence
  pCV2
PLPRALRYRRSRFAAHRLLSPS

SEQ ID NO: 3316 - protein, 141 aa, Artificial Sequence
  pCV2
RVLLSGTLGFEMTDQATPNLPSRDFDSTAAFYERLGFGIVFRDAGWMILQRGDLMLEFFAHGISAEQAVEGADIITTATADKHNATILSDNMIGPGVHINGVGGDCPGKTEMHRDILLRSDIFVEFPPQTRMIPDRSNIWQ

SEQ ID NO: 3317 - protein, 16 aa, Artificial Sequence
  pCV2
SFLRLNPVAGLAMIII

SEQ ID NO: 3318 - protein, 13 aa, Artificial Sequence
  pCV2
FLLNYVKHVIINM

SEQ ID NO: 3319 - protein, 19 aa, Artificial Sequence
  pCV2
CMTLFMRWVFMIRVPQLYI

SEQ ID NO: 3320 - protein, 7 aa, Artificial Sequence
  pCV2
YAIENKI

SEQ ID NO: 3321 - protein, 31 aa, Artificial Sequence
  pCV2
DKLSRAVSSMLLDRASCQCWRRLWWWFWWRL

SEQ ID NO: 3322 - protein, 4 aa, Artificial Sequence
  pCV2
GWWL

SEQ ID NO: 3323 - protein, 4 aa, Artificial Sequence
  pCV2
GWRF

SEQ ID NO: 3324 - protein, 4 aa, Artificial Sequence
  pCV2
GWRL

SEQ ID NO: 3325 - protein, 11 aa, Artificial Sequence
  pCV2
GRRFRWWLWFR

SEQ ID NO: 3326 - protein, 5 aa, Artificial Sequence
  pCV2
KDGKR

SEQ ID NO: 3327 - protein, 8 aa, Artificial Sequence
  pCV2
GGYDRKCR

SEQ ID NO: 3328 - protein, 5 aa, Artificial Sequence
  pCV2
KRATV

SEQ ID NO: 3329 - protein, 4 aa, Artificial Sequence
  pCV2
FCRY

SEQ ID NO: 3330 - protein, 10 aa, Artificial Sequence
  pCV2
LRCCYRWFHW

SEQ ID NO: 3331 - protein, 5 aa, Artificial Sequence
  pCV2
RFRPC

SEQ ID NO: 3332 - protein, 4 aa, Artificial Sequence
  pCV2
WCYW

SEQ ID NO: 3333 - protein, 4 aa, Artificial Sequence
  pCV2
FCWL

SEQ ID NO: 3334 - protein, 7 aa, Artificial Sequence
  pCV2
FPNGSSR

SEQ ID NO: 3335 - protein, 5 aa, Artificial Sequence
  pCV2
FTFNE

SEQ ID NO: 3336 - protein, 12 aa, Artificial Sequence
  pCV2
FPSIFTFPPSIG

SEQ ID NO: 3337 - protein, 36 aa, Artificial Sequence
  pCV2
MSPFCLWPNTQTASPRALADSLMQLARQVSRLESGQ

SEQ ID NO: 3338 - protein, 4 aa, Artificial Sequence
  pCV2
AQRN

SEQ ID NO: 3339 - protein, 36 aa, Artificial Sequence
  pCV2
CELAHSLGTPGFTLYASGSYVVWNCERITISHRKQL

SEQ ID NO: 3340 - protein, 254 aa, Artificial Sequence
  pCV2
LRQACMPAGPQISLFNFRKNANPQMVREAYAAGLIKTIYPSNNLQEIKYLPKKVKDAVKRFRTNCIKNTEKDIFLKIRSTIPVWTIQGLLHKPRQVIEIGVSKKVVPTESKAMESKIQIEDLTELAVKTGEQFIQSLLRLNDKKKIFVNMVEHDTLVYSKNIKDTVSEDQRAIETFQQRVISGNLLGFHCPAICHFIVKIVEKEGGSYKCHHCDKGKAIVEDASADSGPKDGPPPTRSIVEKEDVPTTSSKQVD

SEQ ID NO: 3341 - protein, 23 aa, Artificial Sequence
  pCV2
CDISTDVRDDAQSHYPSQDPSSI

SEQ ID NO: 3342 - protein, 52 aa, Artificial Sequence
  pCV2
GSSFHLERTRGTLEDPCLFSYYFLLSLVVVTLTGAPLLMMFKLLITLNILHL

SEQ ID NO: 3343 - protein, 16 aa, Artificial Sequence
  pCV2
GGFTILMKFLDQTLFI

SEQ ID NO: 3344 - protein, 52 aa, Artificial Sequence; identical to SEQ ID NO: 31
  pCV2

SEQ ID NO: 3345 - protein, 6 aa, Artificial Sequence
  pCV2
TTSHSR

SEQ ID NO: 3346 - protein, 36 aa, Artificial Sequence; identical to SEQ ID NO: 33
  pCV2

SEQ ID NO: 3347 - protein, 51 aa, Artificial Sequence; identical to SEQ ID NO: 34
  pCV2

SEQ ID NO: 3348 - protein, 10 aa, Artificial Sequence
  pCV2
FVIYLLVLTL

SEQ ID NO: 3349 - protein, 40 aa, Artificial Sequence; identical to SEQ ID NO: 36
  pCV2

SEQ ID NO: 3350 - protein, 56 aa, Artificial Sequence; identical to SEQ ID NO: 37
  pCV2

SEQ ID NO: 3351 - protein, 59 aa, Artificial Sequence; identical to SEQ ID NO: 38
  pCV2

SEQ ID NO: 3352 - protein, 13 aa, Artificial Sequence
  pCV2
MIFASPMSMQILL

SEQ ID NO: 3353 - protein, 5 aa, Artificial Sequence
  pCV2
SREMM

SEQ ID NO: 3354 - protein, 80 aa, Artificial Sequence; identical to SEQ ID NO: 41
  pCV2

SEQ ID NO: 3355 - protein, 18 aa, Artificial Sequence
  pCV2
MIMVFTPLLALATNLTEL

SEQ ID NO: 3356 - protein, 6 aa, Artificial Sequence
  pCV2
YFLLNF

SEQ ID NO: 3357 - protein, 33 aa, Artificial Sequence; identical to SEQ ID NO: 44
  pCV2

SEQ ID NO: 3358 - protein, 32 aa, Artificial Sequence; identical to SEQ ID NO: 45
  pCV2

SEQ ID NO: 3359 - protein, 9 aa, Artificial Sequence
  pCV2
TFHLALLGV

SEQ ID NO: 3360 - protein, 53 aa, Artificial Sequence; identical to SEQ ID NO: 47
  pCV2

SEQ ID NO: 3361 - protein, 25 aa, Artificial Sequence
  pCV2
ELSMSTLLMSATFLLELAFVLLPYS

SEQ ID NO: 3362 - protein, 36 aa, Artificial Sequence
  pCV2
TRKGRILQISITLAAARPRGGARYSSNFPDRSNIWQ

SEQ ID NO: 3363 - protein, 16 aa, Artificial Sequence
  pCV2
SFLRLNPVAGLAMIII

SEQ ID NO: 3364 - protein, 13 aa, Artificial Sequence
  pCV2
FLLNYVKHVIINM

SEQ ID NO: 3365 - protein, 19 aa, Artificial Sequence
  pCV2
CMTLFMRWVFMIRVPQLYI

SEQ ID NO: 3366 - protein, 7 aa, Artificial Sequence
  pCV2
YAIENKI

SEQ ID NO: 3367 - protein, 24 aa, Artificial Sequence
  pCV2
DKLSRAVSSMLLDREFTGRRFTTS

SEQ ID NO: 3368 - protein, 9 aa, Artificial Sequence
  pCV2
LGKPWRYPT

SEQ ID NO: 3369 - protein, 12 aa, Artificial Sequence
  pCV2
SPCSTSPFRQLA

SEQ ID NO: 3370 - protein, 39 aa, Artificial Sequence
  pCV2
RRGPHRSPFPTVAQPEWRPLLSLSSLPFSPRSPAFPVKL

SEQ ID NO: 3371 - protein, 5 aa, Artificial Sequence
  pCV2
IGGSL

SEQ ID NO: 3372 - protein, 34 aa, Artificial Sequence
  pCV2
GSDLVLYGTSTPKNLIWVMVHVVGHRPDRRFFAL

SEQ ID NO: 3373 - protein, 90 aa, Artificial Sequence
  pCV2
RWSPRSLIVDSCSKLEQHSTLSRAILLIYKGFCRFRNHHQTGFSPAGANQRGPLAATLSGPGGEGQSAVARLTGEKKNHPSTLKTSAMCY

SEQ ID NO: 3374 - protein, 45 aa, Artificial Sequence
  pCV2
ASICLHHNISCHQPANSSPTGSSAQNHHSIQAAHQSGTASAGEPL

SEQ ID NO: 3375 - protein, 21 aa, Artificial Sequence
  pCV2
GGRLCSCYRCYSEERQLSCRV

SEQ ID NO: 3376 - protein, 21 aa, Artificial Sequence
  pCV2
NTDDLAEGSMLIVTMTERCCL

SEQ ID NO: 3377 - protein, 33 aa, Artificial Sequence
  pCV2
SNIISLAEIRIISLLIHFSLNRDRLSILRTMPT

SEQ ID NO: 3378 - protein, 4 aa, Artificial Sequence
  pCV2
EIAG

SEQ ID NO: 3379 - protein, 5 aa, Artificial Sequence
  pCV2
VALFL

SEQ ID NO: 3380 - protein, 26 aa, Artificial Sequence
  pCV2
TLTISTPLSIAHRMVQVGDPKFRLSA

SEQ ID NO: 3381 - protein, 4 aa, Artificial Sequence
  pCV2
CIPG

SEQ ID NO: 3382 - protein, 28 aa, Artificial Sequence
  pCV2
STPDLGLRKPSKETTVGSSREIPRNQRK

SEQ ID NO: 3383 - protein, 135 aa, Artificial Sequence
  pCV2
VKPAPIRPSHARPRTLVPVGIGIGGSNTKATGTSRSPPAASCQAVKVSRGTGGCHLRVSTVPNAMETAPARPAATPTGSSAAFGVNTNSATPAVPQIAPRTAINRIGLPSRAAEMNTTISGCTAPTVAATPPGRR

SEQ ID NO: 3384 - protein, 67 aa, Artificial Sequence
  pCV2
TEINNKLQNSEILSAPRMKMRIHQIPVGICRTIITSNKPAGNARSSIPATPRPRCSGSTKTPDRCAL

SEQ ID NO: 3385 - protein, 20 aa, Artificial Sequence
  pCV2
ASLGPSSCLKTDSPMISPSM

SEQ ID NO: 3386 - protein, 23 aa, Artificial Sequence
  pCV2
APNATASRNRSANASMGFFSSCS

SEQ ID NO: 3387 - protein, 30 aa, Artificial Sequence
  pCV2
TDPNISGAFFRADNRISRKSCTSAAPSRRI

SEQ ID NO: 3388 - protein, 16 aa, Artificial Sequence
  pCV2
ALITIVNFNPLFIGSS

SEQ ID NO: 3389 - protein, 51 aa, Artificial Sequence
  pCV2
SAPCVPSDTERSKCVEQCPLVPEMPVKRWLLNPQPELTPQGPSVCNAPGHH

SEQ ID NO: 3390 - protein, 33 aa, Artificial Sequence
  pCV2
PRRVPPGRCLATLRRLRRPARATSSRGWNPIRT

SEQ ID NO: 3391 - protein, 6 aa, Artificial Sequence
  pCV2
GGRFPA

SEQ ID NO: 3392 - protein, 8 aa, Artificial Sequence
  pCV2
AGTAPGAS

SEQ ID NO: 3393 - protein, 18 aa, Artificial Sequence
  pCV2
NSRTSVGPSATACGTSPI

SEQ ID NO: 3394 - protein, 48 aa, Artificial Sequence
  pCV2
ISCSGRQQTARRFPRRSGPGNGTFSCHGPGRGSGAAATPIPGAQRGRT

SEQ ID NO: 3395 - protein, 21 aa, Artificial Sequence
  pCV2
SPSPSPVGATGIPRPSCNTGH

SEQ ID NO: 3396 - protein, 12 aa, Artificial Sequence
  pCV2
STSPGPGKARRT

SEQ ID NO: 3397 - protein, 4 aa, Artificial Sequence
  pCV2
SARR

SEQ ID NO: 3398 - protein, 26 aa, Artificial Sequence
  pCV2
GCASRTPTPAATPVRHRRPAARRRCR

SEQ ID NO: 3399 - protein, 5 aa, Artificial Sequence
  pCV2
SSRPC

SEQ ID NO: 3400 - protein, 15 aa, Artificial Sequence
  pCV2
PCFAAPRAGFSCCAW

SEQ ID NO: 3401 - protein, 29 aa, Artificial Sequence
  pCV2
TGQSGPCRLASLASCPATAQYRTRKAAFP

SEQ ID NO: 3402 - protein, 15 aa, Artificial Sequence
  pCV2
SAASCVSATRPAWPR

SEQ ID NO: 3403 - protein, 16 aa, Artificial Sequence
  pCV2
PVLPGPRRRFFASWSS

SEQ ID NO: 3404 - protein, 46 aa, Artificial Sequence
  pCV2
FLACRWSSTSPNLPPPVRDDANAPRRPMARAGQGEPVARCRARSWP

SEQ ID NO: 3405 - protein, 17 aa, Artificial Sequence
  pCV2
LAGPSSRRTGRFRGAHA

SEQ ID NO: 3406 - protein, 67 aa, Artificial Sequence
  pCV2
RCGLRWFRHPRRKTPRRSVLACMPSGQTSDSFTLLAGLPRLTPGQCALIPDLTRLVPWCPDNPPYRQ

SEQ ID NO: 3407 - protein, 42 aa, Artificial Sequence
  pCV2
SRSRRPSGRPSRTWYSESCPARIPATPCPNTCRGPRPESQNT

SEQ ID NO: 3408 - protein, 20 aa, Artificial Sequence
  pCV2
CGRSRCAPACRRHRCATSRY

SEQ ID NO: 3409 - protein, 7 aa, Artificial Sequence
  pCV2
NNSSSKI

SEQ ID NO: 3410 - protein, 111 aa, Artificial Sequence
  pCV2
YFIFSQSGLIPSKSKNSSTYCSSPISSLIDRTQKAMSYHLSALPLLPRSIKPLTLPSFTKMLLSPRSPWEKTSSSSGFSVFKKSYSSRGSLNGVSSSQFSQSTSARSLFSK

SEQ ID NO: 3411 - protein, 12 aa, Artificial Sequence
  pCV2
SNSAKRLSKLFV

SEQ ID NO: 3412 - protein, 8 aa, Artificial Sequence
  pCV2
GQSDMSME

SEQ ID NO: 3413 - protein, 67 aa, Artificial Sequence
  pCV2
KSLMHSAYSSIIFSGLCSSSYSSEQRTPSASLMSRLLQPSCRSKCRTFGTGSFPSSHSIMSFSRSTS

SEQ ID NO: 3414 - protein, 64 aa, Artificial Sequence
  pCV2
VVPLYRLSVIFKYRFSFSPTSLYTLAGDIPSVSFTQRYFSISFFNSGDILILAIYYFLPLFYSI

SEQ ID NO: 3415 - protein, 40 aa, Artificial Sequence
  pCV2
RYPKKLIITRRTPIHCSLHSKTLNTRKQLFQSCFQSWRIT

SEQ ID NO: 3416 - protein, 6 aa, Artificial Sequence
  pCV2
YRRSRF

SEQ ID NO: 3417 - protein, 5 aa, Artificial Sequence
  pCV2
NHNYG

SEQ ID NO: 3418 - protein, 77 aa, Artificial Sequence
  pCV2
CCQLTDLVYDGVFEVLQWLLCLSAVPPVQLLTGWCVTAKAPPDISAISALTAVKHGNCSSLTPLLNPVRTRKSLIWP

SEQ ID NO: 3419 - protein, 22 aa, Artificial Sequence
  pCV2
MALDAGQQPALWALASTRFYVT

SEQ ID NO: 3420 - protein, 15 aa, Artificial Sequence
  pCV2
KTQAAVGNLAHTAGQ

SEQ ID NO: 3421 - protein, 16 aa, Artificial Sequence
  pCV2
RHRLRGNGRTVGLCRG

SEQ ID NO: 3422 - protein, 10 aa, Artificial Sequence
  pCV2
IAPALAVLRV

SEQ ID NO: 3423 - protein, 12 aa, Artificial Sequence
  pCV2
QSPEDGCCARIR

SEQ ID NO: 3424 - protein, 16 aa, Artificial Sequence
  pCV2
THYGDAGASYEPAVTL

SEQ ID NO: 3425 - protein, 12 aa, Artificial Sequence
  pCV2
RGDMDDGWLAAV

SEQ ID NO: 3426 - protein, 18 aa, Artificial Sequence
  pCV2
IPPEGKAARNQQAIYAAN

SEQ ID NO: 3427 - protein, 24 aa, Artificial Sequence
  pCV2
PESEAAPGTAGTEVAVVLKIGGAA

SEQ ID NO: 3428 - protein, 37 aa, Artificial Sequence
  pCV2
QSHRALSEHKTLSISWSHYPIMIEFTSYKVIVLGFKH

SEQ ID NO: 3429 - protein, 74 aa, Artificial Sequence
  pCV2
SMQVFMLCPFYRYIDKRAAYALPPEILTYGDIFYIKDILSYQYCQYIQGNLPPHPLHPLRLGSFLNMALHRVIL

SEQ ID NO: 3430 - protein, 10 aa, Artificial Sequence
  pCV2
RSNSRFHTSV

SEQ ID NO: 3431 - protein, 152 aa, Artificial Sequence
  pCV2
SYLSPQMVRWVYRTPEHEHGTRDHYAKNAQGKNCRPRHEVRECPDGRSEGQAATQAAALTARHLVAECRCQHLRHVNASGRRARADRPSRYCPDPGNGKDCQRCHFWGEAVRGRGAQPLGGWEARVSGPGGFEKGGHPPSACAVTRTGRSPG

SEQ ID NO: 3432 - protein, 4 aa, Artificial Sequence
  pCV2
KQGL

SEQ ID NO: 3433 - protein, 55 aa, Artificial Sequence
  pCV2
KQVKRQVSGGRKTGGNPCKCWIFCLWTAPQMSIGAPLICQHSAPQVSRIAPLICQ

SEQ ID NO: 3434 - protein, 71 aa, Artificial Sequence
  pCV2
SRPSSVNTAGHLSPGLSTSSVGNSRKIRRFRRFARLASSTSPAEIEPAPHLSTPRRVSRPLKCQRPPLICQ

SEQ ID NO: 3435 - protein, 44 aa, Artificial Sequence
  pCV2
GPSFPRGIHNAGGRGVSHTASTAFLARLQGHRRPPAQRRGQPAR

SEQ ID NO: 3436 - DNA, 14935 bp, Artificial Sequence; identical to SEQ ID NO: 3164
  pCV2
  CDS (3)..(14933)

SEQ ID NO: 3437 - protein, 59 aa, Artificial Sequence
  pCV2
SVAKALGLALLVGDVLHQLREVALLDGAHGDVLGNHAHPPAVLAAKKVMALPSGGPRPS

SEQ ID NO: 3438 - protein, 30 aa, Artificial Sequence
  pCV2
PCQARPASLRSSPAGRGSWHHRTAPCAGRR

SEQ ID NO: 3439 - protein, 14 aa, Artificial Sequence
  pCV2
ARVSAGRPGGPGRH

SEQ ID NO: 3440 - protein, 14 aa, Artificial Sequence
  pCV2
CGPARGRAHSPRRP

SEQ ID NO: 3441 - protein, 35 aa, Artificial Sequence
  pCV2
FCSPGRRPAGRPTGSCRPPPPFPQSLFVRLEGSTP

SEQ ID NO: 3442 - protein, 23 aa, Artificial Sequence
  pCV2
VGCPSWLAWFHQPSACPHLLRRR

SEQ ID NO: 3443 - protein, 10 aa, Artificial Sequence
  pCV2
PASLAEQDSR

SEQ ID NO: 3444 - protein, 9 aa, Artificial Sequence
  pCV2
APPGANKGQ

SEQ ID NO: 3445 - protein, 49 aa, Artificial Sequence
  pCV2
RRNTRSRVGLLHLSCPADAVGYTKESLHEPFGKILYIVRKRMDIPKKSL

SEQ ID NO: 3446 - protein, 54 aa, Artificial Sequence
  pCV2
PRSRVMQRKSATLPEGRKADRYPVSGRVGTGERTRELPGGNAWYLYSPVGFRHL

SEQ ID NO: 3447 - protein, 6 aa, Artificial Sequence
  pCV2
LERRFL

SEQ ID NO: 3448 - protein, 48 aa, Artificial Sequence
  pCV2
CSSGGRSLWKNASNAAFLRFLAFCWPFAHMFFPALSPDSVDNRITAFE

SEQ ID NO: 3449 - protein, 69 aa, Artificial Sequence
  pCV2
ADTARRSRTTERSESVSEEAEERQKAAREAERGREAWTLGQGMKKPVAGCYGRLTRWKGGGDVVYMALL

SEQ ID NO: 3450 - protein, 21 aa, Artificial Sequence
  pCV2
VGCAPAAVLINRHPFSVLQRS

SEQ ID NO: 3451 - protein, 64 aa, Artificial Sequence
  pCV2
QRASFSPIHRQSPRVPARTLRPDRLRRRRLSRPATAARAEPVQRCRRARRHRCRRPAPQARPQQ

SEQ ID NO: 3452 - protein, 5 aa, Artificial Sequence
  pCV2
LSSAH

SEQ ID NO: 3453 - protein, 44 aa, Artificial Sequence
  pCV2
RRPRPKNPPRRGSEAARRPFPSAVRPVACRHGCARHRGRRAAPA

SEQ ID NO: 3454 - protein, 40 aa, Artificial Sequence
  pCV2
SCGHSRSEMSASRRRLSAPNAYDSPPAWLRPVRRAAPACS

SEQ ID NO: 3455 - protein, 50 aa, Artificial Sequence
  pCV2
SASKAPAAEPPTVPPVCVSSDRLRRPRSTGPGRHGSLYSAATLSCLTLYH

SEQ ID NO: 3456 - protein, 125 aa, Artificial Sequence
  pCV2
YVHQLISDKESARSIGPAEAGPEARRETQHTPDRNSEHCRARRCRHRPDYAGAAGPPARSGSLERRHRPLWHSAGAVCVGAICLRTCAGRAVGSFRAAANLARLAGRRQIWGTLWLACTYKWTNG

SEQ ID NO: 3457 - protein, 18 aa, Artificial Sequence
  pCV2
TFSRPFKYPIILINALFS

SEQ ID NO: 3458 - protein, 10 aa, Artificial Sequence
  pCV2
VYPPIYPVKH

SEQ ID NO: 3459 - protein, 25 aa, Artificial Sequence
  pCV2
FKLKAGNDNLIMSGELRESRYDPRR

SEQ ID NO: 3460 - protein, 60 aa, Artificial Sequence
  pCV2
RGTSRFTFGTDRTATLKEPLSRGFLEFNELSTYVRNHYCAFKSRLRSLSASKYFLSKMLH

SEQ ID NO: 3461 - protein, 293 aa, Artificial Sequence
  pCV2
RSINSPRYPIRVSYSLSIQIICTGSGSFRMIEQDGLHAGSPAAWVERLFGYDWAQQTIGCSDAAVFRLSAQGRPVLFVKTDLSGALNELQDEAARLSWLATTGVPCAAVLDVVTEAGRDWLLLGEVPGQDLLSSHLAPAEKVSIMADAMRRLHTLDPATCPFDHQAKHRIERARTRMEAGLVDQDDLDEEHQGLAPAELFARLKARMPDGDDLVVTHGDACLPNIMVENGRFSGFIDCGRLGVADRYQDIALATRDIAEELGGEWADRFLVLYGIAAPDSQRIAFYRLLDEFF

SEQ ID NO: 3462 - protein, 7 aa, Artificial Sequence
  pCV2
AGLWGSK

SEQ ID NO: 3463 - protein, 34 aa, Artificial Sequence
  pCV2
PTKRRPTCHHEISIPPPPSMKGWASESFSGTPAG

SEQ ID NO: 3464 - protein, 40 aa, Artificial Sequence
  pCV2
SSSAGISCWSSSPTGSLRNRRSKVPISLRQQRPTSTTPRS

SEQ ID NO: 3465 - protein, 39 aa, Artificial Sequence
  pCV2
SGPASTSTASAATAQARPRCTAISCCVRIFSWSSRHRPG

SEQ ID NO: 3466 - protein, 12 aa, Artificial Sequence
  pCV2
SPIVQTFGNKVS

SEQ ID NO: 3467 - protein, 7 aa, Artificial Sequence
  pCV2
ILLPVLR

SEQ ID NO: 3468 - protein, 6 aa, Artificial Sequence
  pCV2
LSYNFC

SEQ ID NO: 3469 - protein, 5 aa, Artificial Sequence
  pCV2
ITLSM

SEQ ID NO: 3470 - protein, 5 aa, Artificial Sequence
  pCV2
LTCNA

SEQ ID NO: 3471 - protein, 4 aa, Artificial Sequence
  pCV2
DGFL

SEQ ID NO: 3472 - protein, 11 aa, Artificial Sequence
  pCV2
LESRNYTFNTR

SEQ ID NO: 3473 - protein, 20 aa, Artificial Sequence
  pCV2
KTKYSAQTRINYRARCHLCY

SEQ ID NO: 3474 - protein, 164 aa, Artificial Sequence
  pCV2
IGPPVNAGGGSGGGSGGGSEGGGSEGGGSEGGGSEGGGSGGGSGSGDFDYEKMANANKGAMTENADENALQSDAKGKLDSVATDYGAAIDGFIGDVSGLANGNGATGDFAGSNSQMAQVGDGDNSPLMNNFRQYLPSLPQSVECRPFVFGPIRKPPLPARWPIH

SEQ ID NO: 3475 - protein, 22 aa, Artificial Sequence
  pCV2
CSWHDRFPDWKAGSERNAINVS

SEQ ID NO: 3476 - protein, 20 aa, Artificial Sequence
  pCV2
APQALHFMLPARMLCGIVSG

SEQ ID NO: 3477 - protein, 106 aa, Artificial Sequence
  pCV2
QFHTGNSYDHDYAKLACLQVPRLAFSISERMLTHRWLERLTQQVSSRRSTRAIISRKSNTFPRRLKMQSKDSGLTASRTQRKIYFSRSEVLFQYGRFKACFTNQGK

SEQ ID NO: 3478 - protein, 7 aa, Artificial Sequence
  pCV2
RLESLKR

SEQ ID NO: 3479 - protein, 13 aa, Artificial Sequence
  pCV2
FPLNQRPWSQRFK

SEQ ID NO: 3480 - protein, 4 aa, Artificial Sequence
  pCV2
QNSP

SEQ ID NO: 3481 - protein, 52 aa, Artificial Sequence
  pCV2
RLANSSYRVSYDSMTRRKSSSTWWSTTHLSTPKISKIQSQKTKGQLRLFNKG

SEQ ID NO: 3482 - protein, 17 aa, Artificial Sequence
  pCV2
YPETSSDSIAQLSVTLL

SEQ ID NO: 3483 - protein, 61 aa, Artificial Sequence
  pCV2
WKRKVAPTNAIIAIKERPSLKMPLPTVVPKMDPHPRGASWKKKTFQPRLQSKWIDVISPLT

SEQ ID NO: 3484 - protein, 29 aa, Artificial Sequence
  pCV2
GMTHNPTILRKTLPLYKEVHFIWREHGGL

SEQ ID NO: 3485 - protein, 13 aa, Artificial Sequence
  pCV2
RIHVYFLIISYSH

SEQ ID NO: 3486 - protein, 5 aa, Artificial Sequence
  pCV2
PVHHF

SEQ ID NO: 3487 - protein, 4 aa, Artificial Sequence
  pCV2
CSSS

SEQ ID NO: 3488 - protein, 14 aa, Artificial Sequence
  pCV2
LHSTYFIYEGGLLS

SEQ ID NO: 3489 - protein, 16 aa, Artificial Sequence
  pCV2
IRHSLFNSGFISSILF

SEQ ID NO: 3490 - protein, 7 aa, Artificial Sequence
  pCV2
CYRVSYY

SEQ ID NO: 3491 - protein, 10 aa, Artificial Sequence
  pCV2
SYVWQPCHTF

SEQ ID NO: 3492 - protein, 33 aa, Artificial Sequence; identical to SEQ ID NO: 161
  pCV2

SEQ ID NO: 3493 - protein, 6 aa, Artificial Sequence
  pCV2
CCYTSM

SEQ ID NO: 3494 - protein, 7 aa, Artificial Sequence
  pCV2
QPFLCCF

SEQ ID NO: 3495 - protein, 12 aa, Artificial Sequence
  pCV2
THGYTDTYYDIR

SEQ ID NO: 3496 - protein, 7 aa, Artificial Sequence
  pCV2
LHFRVHI

SEQ ID NO: 3497 - protein, 4 aa, Artificial Sequence
  pCV2
CLFA

SEQ ID NO: 3498 - protein, 6 aa, Artificial Sequence
  pCV2
CFRKVR

SEQ ID NO: 3499 - protein, 7 aa, Artificial Sequence
  pCV2
TLTRVCV

SEQ ID NO: 3500 - protein, 7 aa, Artificial Sequence
  pCV2
RWVSLCL

SEQ ID NO: 3501 - protein, 9 aa, Artificial Sequence
  pCV2
GLSTYRCSS

SEQ ID NO: 3502 - protein, 5 aa, Artificial Sequence
  pCV2
STFWF

SEQ ID NO: 3503 - protein, 6 aa, Artificial Sequence
  pCV2
HFETYF

SEQ ID NO: 3504 - protein, 5 aa, Artificial Sequence
  pCV2
VASWY

SEQ ID NO: 3505 - protein, 4 aa, Artificial Sequence
  pCV2
HYKF

SEQ ID NO: 3506 - protein, 34 aa, Artificial Sequence; identical to SEQ ID NO: 175
  pCV2

SEQ ID NO: 3507 - protein, 8 aa, Artificial Sequence
  pCV2
KWYNHRCC

SEQ ID NO: 3508 - protein, 7 aa, Artificial Sequence
  pCV2
LFSKSTC

SEQ ID NO: 3509 - protein, 5 aa, Artificial Sequence
  pCV2
TQMLC

SEQ ID NO: 3510 - protein, 7 aa, Artificial Sequence
  pCV2
QRNLPDL

SEQ ID NO: 3511 - protein, 13 aa, Artificial Sequence
  pCV2
FQGCSLRRCCEIP

SEQ ID NO: 3512 - protein, 11 aa, Artificial Sequence
  pCV2
YYKLVSFWRGF

SEQ ID NO: 3513 - protein, 13 aa, Artificial Sequence
  pCV2
IPFCLCMGEKKNF

SEQ ID NO: 3514 - protein, 13 aa, Artificial Sequence
  pCV2
LLCALQLNIFFNL

SEQ ID NO: 3515 - protein, 7 aa, Artificial Sequence
  pCV2
VLWRFCH

SEQ ID NO: 3516 - protein, 16 aa, Artificial Sequence
  pCV2
SLLLQCLCRFFCSQGR

SEQ ID NO: 3517 - protein, 13 aa, Artificial Sequence
  pCV2
CKTNSARTNWCYC

SEQ ID NO: 3518 - protein, 10 aa, Artificial Sequence
  pCV2
FHGLCPCLEY

SEQ ID NO: 3519 - protein, 5 aa, Artificial Sequence
  pCV2
CYFNW

SEQ ID NO: 3520 - protein, 4 aa, Artificial Sequence
  pCV2
TWQA

SEQ ID NO: 3521 - protein, 4 aa, Artificial Sequence
  pCV2
ERHI

SEQ ID NO: 3522 - protein, 5 aa, Artificial Sequence
  pCV2
CAFLP

SEQ ID NO: 3523 - protein, 9 aa, Artificial Sequence
  pCV2
WQTLHPTCS

SEQ ID NO: 3524 - protein, 6 aa, Artificial Sequence
  pCV2
LLLAIK

SEQ ID NO: 3525 - protein, 21 aa, Artificial Sequence
  pCV2
LWFLHHYWHWLPTLQSCSTFF

SEQ ID NO: 3526 - protein, 15 aa, Artificial Sequence
  pCV2
TFKCTGHGLWTKIIH

SEQ ID NO: 3527 - protein, 6 aa, Artificial Sequence
  pCV2
EPVCQF

SEQ ID NO: 3528 - protein, 23 aa, Artificial Sequence
  pCV2
WTHWYWCVNSFFKEISTISTIWP

SEQ ID NO: 3529 - protein, 5 aa, Artificial Sequence
  pCV2
FRSRS

SEQ ID NO: 3530 - protein, 23 aa, Artificial Sequence
  pCV2
NIRHFTLLFWGCKCNYTWNKCFI

SEQ ID NO: 3531 - protein, 8 aa, Artificial Sequence
  pCV2
SCCSISRC

SEQ ID NO: 3532 - protein, 34 aa, Artificial Sequence; identical to SEQ ID NO: 201
  pCV2

SEQ ID NO: 3533 - protein, 6 aa, Artificial Sequence
  pCV2
ACRHFL

SEQ ID NO: 3534 - protein, 56 aa, Artificial Sequence
  pCV2
VRHSYWSWHLCYYHTVRLEKGEFCRYPSHWRPLDLEGGPGTARISPIVQTFGNKVS

SEQ ID NO: 3535 - protein, 7 aa, Artificial Sequence
  pCV2
ILLPVLR

SEQ ID NO: 3536 - protein, 6 aa, Artificial Sequence
  pCV2
LSYNFC

SEQ ID NO: 3537 - protein, 5 aa, Artificial Sequence
  pCV2
ITLSM

SEQ ID NO: 3538 - protein, 5 aa, Artificial Sequence
  pCV2
LTCNA

SEQ ID NO: 3539 - protein, 4 aa, Artificial Sequence
  pCV2
DGFL

SEQ ID NO: 3540 - protein, 11 aa, Artificial Sequence
  pCV2
LESRNYTFNTR

SEQ ID NO: 3541 - protein, 20 aa, Artificial Sequence
  pCV2
KTKYSAQTRINYRARCHLCY

SEQ ID NO: 3542 - protein, 86 aa, Artificial Sequence
  pCV2
IGNSLAVVLQRRDWENPGVTQLNRLAAHPPFASWRNSEEARTDRPSQQLRSLNGARSFRFLPFLSRHVRRLSPSSSKSGAPFRVPI

SEQ ID NO: 3543 - protein, 10 aa, Artificial Sequence
  pCV2
CFTAPRPQKT

SEQ ID NO: 3544 - protein, 19 aa, Artificial Sequence
  pCV2
WAIALIDGFSPFDVGVHVL

SEQ ID NO: 3545 - protein, 18 aa, Artificial Sequence
  pCV2
WTLVPNWNNTQPYLGLFF

SEQ ID NO: 3546 - protein, 55 aa, Artificial Sequence
  pCV2
FIRDFADFGTTIKQDFRLLGQTSVDRLLQLSQGQAVKGNQLLPVSLVKRKTTPVH

SEQ ID NO: 3547 - protein, 73 aa, Artificial Sequence
  pCV2
KRPQCVIKLSKRQFVYTTIYPATSQPTAPRPAARHKITTRYRQPISPGRRQRESRCKAADFAHVTDAIRKNGN

SEQ ID NO: 3548 - protein, 15 aa, Artificial Sequence
  pCV2
AAGFETRMISRRVAC

SEQ ID NO: 3549 - protein, 34 aa, Artificial Sequence
  pCV2
QSVAACDQISSPSQRSELSAFLFISRLTVTGCRS

SEQ ID NO: 3550 - protein, 27 aa, Artificial Sequence
  pCV2
ELCRHNRKSLDKAAEEAEWRYFFRSER

SEQ ID NO: 3551 - protein, 36 aa, Artificial Sequence
  pCV2
RYQLPYPLLTEWYRSGTRSSDCRPDASPADRPQIWG

SEQ ID NO: 3552 - protein, 8 aa, Artificial Sequence
  pCV2
ESPVRKQL

SEQ ID NO: 3553 - protein, 31 aa, Artificial Sequence
  pCV2
VRVARSPGTKGSRLNPLRSGRATPGREHWFL

SEQ ID NO: 3554 - protein, 25 aa, Artificial Sequence
  pCV2
ASGLADQTLKLLERAEVLRPPVARR

SEQ ID NO: 3555 - protein, 49 aa, Artificial Sequence
  pCV2
AEAREVATCGSARFRTPWKPPPPGPLRRRQDLALRLVSTPTAPRPQFRK

SEQ ID NO: 3556 - protein, 17 aa, Artificial Sequence
  pCV2
PPGPPSIVSGYLAERQR

SEQ ID NO: 3557 - protein, 23 aa, Artificial Sequence
  pCV2
TRPSAAAQRLPSPRPRPAGGRPK

SEQ ID NO: 3558 - protein, 9 aa, Artificial Sequence
  pCV2
TTSSRIAKY

SEQ ID NO: 3559 - protein, 4 aa, Artificial Sequence
  pCV2
VRRG

SEQ ID NO: 3560 - protein, 58 aa, Artificial Sequence
  pCV2
RCASTRFPLESVGRSSRAINPPATPAAAYRRPLGLAVRAPRKRRTDAPCERPWGRPPV

SEQ ID NO: 3561 - protein, 5 aa, Artificial Sequence
  pCV2
RPTAQ

SEQ ID NO: 3562 - protein, 62 aa, Artificial Sequence
  pCV2
SRRRCRRRMPRHLATVQRTPPWAFSPRARKRTRTSLELSSGPTIGSRGNPARRPLQAVESEP

SEQ ID NO: 3563 - protein, 40 aa, Artificial Sequence
  pCV2
SQLSILILCLSAVRRARRASRAILSEASASSSARLFLKCQ

SEQ ID NO: 3564 - protein, 4 aa, Artificial Sequence
  pCV2
SAGC

SEQ ID NO: 3565 - protein, 5 aa, Artificial Sequence
  pCV2
TPSRN

SEQ ID NO: 3566 - protein, 139 aa, Artificial Sequence
  pCV2
PHKALAFAMHQVIIDPGVFHQAAASQLFAGFADLLAPLLHAGGIRSAHEAEGFQLERVRLPVRAEIVEHPSGRRRQLAVLLPYEFRVVVASKQHDDFLVDQDLATGRFLATVQDAEAVQQRHRFQVPNAVGREAHRRRL

SEQ ID NO: 3567 - protein, 267 aa, Artificial Sequence
  pCV2
ARQAFLGLRVIPAIDRPAQVLAKLVEREGDRLADRGALRVLQHLLPHQFVIVGPQLDAGVGDLHVLVDVENDLVLQRLARDFLVARGEQGRAGRVVWHRSHRVRPRRNIEQGKLHFLDLLLRVFQQRGLLGLADLFCQVLAGGFSLLGRHSSSRVDGHRLRQTCRLLFETTRTLHGGRWRGQGRGSQLHAVALDLGRSLLDHRADGLEGFAGRTHDGAACDGFGILGGKPRVDQFLPVCLPVKRPIHSPSLRDCPDSRRGNVPLFLI

SEQ ID NO: 3568 - protein, 96 aa, Artificial Sequence
  pCV2
PAWCLGVQIIHLIGNEVGPVDRLAVLLVLGIPNLALHEYQRPLAQILAVGLGLRAKTLDAEEVGALLLVAGIVAPHLGTKTIHPVKYNILFSPNQA

SEQ ID NO: 3569 - protein, 18 aa, Artificial Sequence
  pCV2
SPVSQKIARHTVLPRYPP

SEQ ID NO: 3570 - protein, 21 aa, Artificial Sequence
  pCV2
STGRRRQCHTTCPPCRFSQDQ

SEQ ID NO: 3571 - protein, 40 aa, Artificial Sequence
  pCV2
SHLLCHLSQRCCCLPGRRGKRQVPLRAFPSLKNHTARADL

SEQ ID NO: 3572 - protein, 45 aa, Artificial Sequence
  pCV2
MECLLPSFRNPHRPDRYSVSNPIRLSGCLSYSYRDNPICRWSERA

SEQ ID NO: 3573 - protein, 7 aa, Artificial Sequence
  pCV2
CTPHTAR

SEQ ID NO: 3574 - protein, 21 aa, Artificial Sequence
  pCV2
SFQGFVHLHTLPSKGRHRPHS

SEQ ID NO: 3575 - protein, 59 aa, Artificial Sequence
  pCV2
ADCSSHHAVQSAGPLEQAAFLPAIASCPFPVPHHRWSLYTGCPSFLNIGFHFLPPAYIP

SEQ ID NO: 3576 - protein, 26 aa, Artificial Sequence
  pCV2
QETFLPYLLRSGIFRSVFSIPVIFSF

SEQ ID NO: 3577 - protein, 18 aa, Artificial Sequence
  pCV2
PFIISFLFSTVFKDTPRS

SEQ ID NO: 3578 - protein, 14 aa, Artificial Sequence
  pCV2
QDELQFTVPCILKP

SEQ ID NO: 3579 - protein, 15 aa, Artificial Sequence
  pCV2
IPENSFFKVVFKVGV

SEQ ID NO: 3580 - protein, 21 aa, Artificial Sequence
  pCV2
HSIDGADFETTIMGDAANLLI

SEQ ID NO: 3581 - protein, 23 aa, Artificial Sequence
  pCV2
CMMVFLRCSSGFCVYQLSLLFSY

SEQ ID NO: 3582 - protein, 4 aa, Artificial Sequence
  pCV2
RGGA

SEQ ID NO: 3583 - protein, 16 aa, Artificial Sequence
  pCV2
RQKHRRTSALSLLSLP

SEQ ID NO: 3584 - protein, 20 aa, Artificial Sequence
  pCV2
NMATAVHLHRFSTRYAPENH

SEQ ID NO: 3585 - protein, 174 aa, Artificial Sequence
  pCV2
YGHEWRWMPGNSPHYGRWPQHDFTSLKKLRPQSVTSRIQPGSDVIVCAEMDEQWGYVGAKSRQRWLFYAYDSLRKTVVAHVFGERTMATLGRLMSLLSPFDVVIWMTDGWPLYESRLKGKLHVISKRYTQRIERHNLNLRQHLARLGRKSLSFSKSVELHDKVIGHYLNIKHYQ

SEQ ID NO: 3586 - protein, 7 aa, Artificial Sequence
  pCV2
VGVITQL

SEQ ID NO: 3587 - protein, 49 aa, Artificial Sequence
  pCV2
NLQAIRLLSWVSSISPCKFLCFAHSIDILISALPMPCPLKSLHTAISSI

SEQ ID NO: 3588 - protein, 29 aa, Artificial Sequence
  pCV2
KIYYLISIVNIFKAICLLILFILFVLVAF

SEQ ID NO: 3589 - protein, 6 aa, Artificial Sequence
  pCV2
IWRFIE

SEQ ID NO: 3590 - protein, 208 aa, Artificial Sequence
  pCV2
FCKGPILVFIPRYNLTYHLKWFAGFIAPPNTSTAPATTMPRMPKVKIAGPAMKSVNAPTAEVKGRPPPRPPPSLPGTWSLNVDASTCGTSMLPGVALGLIAHPVTAPIPAMARTASAAIFGVRPFAAEGRSPWGDGRPALAGREGSRRGGTPLRRARSRAQGAALVKNKVYKYWFKSRLKDRLAVAEKRAETLANAGFSACGQPLKCQ

SEQ ID NO: 3591 - protein, 79 aa, Artificial Sequence
  pCV2
VRPSSVSTLPLKCQGSRPSSVSSRAPQVSIPQGTYPQACPHHLWETRVKSGVFADLRGWPAPRRRPKSSLPLICQRRAG

SEQ ID NO: 3592 - protein, 58 aa, Artificial Sequence
  pCV2
VGPSSVNVRPSSVSEGQVFREVSTTPAAAVSRTRLRRRFWRVCRAIDGRQPSGEGNQP

SEQ ID NO: 3593 - DNA, 10591 bp, Artificial Sequence
  pCV6
  CDS (1)..(10590)
tcgcgcgtttcggtgatgacggtgaaaacctctgacacatgcagctcccggagacggtcacagcttgtctgtaagcggatgccgggagcagacaagcccgtcagggcgcgtcagcgggtgttggcgggtgtcggggctggcttaactatgcggcatcagagcagattgtactgagagtgcaccatatgcggtgtgaaataccgcacagatgcgtaaggagaaaataccgcatcaggcgccattcgccattcaggctgcgcaactgttgggaagggcgatcggtgcgggcctcttcgctattacgccagctggcgaaagggggatgtgctgcaaggcgattaagttgggtaacgccagggttttcccagtcacgacgttgtaaaacgacggccagtgccaagcttgaaagagataaattgaacaagtatggtcgtcccctgttgggatgtactattaaacctaaattggggttatctgctaaaaactacggtagagccgtttatgaatgtcttcgcggtggacttgattttactaaagatgatgagaacgtgaactcacaaccatttatgcgttggagagatcgtttcttattttgtgccgaagcactttataaagcacaggctgaaacaggtgaaatcaaagggcattacttgaatgctactgcaggtacatgcgaagaaatgatcaaaagagctgtatttgctagagaattgggcgttccgatcgtaatgcatgactacttaacggggggattcaccgcaaatactagcttggctcattattgccgagataatggtctacttcttcacatccaccgtgcaatgcatgcggttattgatagacagaagaatcatggtatccacttccgggtattagcaaaagcgttacgtatgtctggtggagatcatattcactctggtaccgtagtaggtaaacttgaaggtgaaagagacataactttgggctttgttgatttactgcgtgatgattttgttgaacaagatcgaagtcgcggtatttatttcactcaagattgggtctctttaccaggtgttctacccgtggcttcaggaggtattcacgtttggcatatgcctgctctgaccgagatctttggggatgattccgtactacagttcggtggaggaactttaggacatccttggggtaatgcgccaggtgccgtagctaatcgagtagctctagaagcatgtgtaaaagctcgtaatgaaggacgtgatcttgctcaggaaggtaatgaaattattcgcgaggcttgcaaatggagcccggaactagctgctgcttgtgaagtatggaaagagatcgtatttaattttgcagcagtggacgttttggataagtaaaaacagtagacattagcagataaattagcaggaaataaagaaggataaggagaaagaactcaagtaattatccttcgttctcttaattgaattgcaattaaactcggcccaatcttttactaaaaggattgagccgaatacaacaaagattctattgcatatattttgactaagtatatacttacctagatatacaagatttgaaatacaaaatctagaaaactaaatcaaaatctaagactcaaatctttctattgttgtcttggatcatcgagcttgcatgcctgcagtcgactttcacagtttccattctgaaatgttctctgtactataataaatagtaagtgaatcaacttactactaaaaaaattagtagacttcctcttcggaatagaaatagcctatttctacatagggaaagtcgtgtgcaatgaaaaatgcaagcacgatttggggagaggttttttctctattgtaacaaggaataattatctactccatccgactagttccgggttcgagtcccgggcaacccatatggaaactagaaaggagcaatctgagttttgatttttcactcacttcatttacaaaattttttggtttggtaaattttgttgtatggatatacaactgtcggggctggcttggttgacattggtatatagtctatattatactgttaaataacaagccttctattatctttctagttaatacgtgtgcttgggagtccttgcaatttgaataaaccaagatcttaccatggccgcgcggggttctcatcatcatcatcatggtccgcgggggcccgctagtggtagtgaccttgaccggtgcaccacttttgatgatgttcaagctcctaattacactcaacatacttcatctatgaggggggtttactatcctgatgaaatttttagatcagacactctttatttaactcaggatttatttcttccattttattctaatgttacagggtttcatactattaatcatacgtttggcaaccctgtcataccttttaaggatggtatttattttgctgccacagagaaatcaaatgttgtccgtggttgggtttttggttctaccatgaacaacaagtcacagtcggtgattattattaacaattctactaatgttgttatacgagcatgtaactttgaattgtgtgacaaccctttctttgctgtttctaaacccatgggtacacagacacatactatgatattcgataatgcatttaattgcactttcgagtacatatctgatgccttttcgcttgatgtttcagaaaagtcaggtaattttaaacacttacgagagtttgtgtttaaaaataaagatgggtttctctatgtttataagggctatcaacctatagatgtagttcgtgatctaccttctggttttaacactttgaaacctatttttaagttgcctcttggtattaacattacaaattttagagccattcttacagccttttcacctgctcaagacatttggggcacgtcagctgcagcctattttgttggctatttaaagccaactacatttatgctcaagtatgatgaaaatggtacaatcacagatgctgttgattgttctcaaaatccacttgctgaactcaaatgctctgttaagagctttgagattgacaaaggaatttaccagacctctaatttcagggttgttccctcaggagatgttgtgagattccctaatattacaaacttgtgtccttttggagaggtttttaatgctactaaattcccttctgtctatgcatgggagagaaaaaaaatttctaattgtgttgctgattactctgtgctctacaactcaacatttttttcaacctttaagtgctatggcgtttctgccactaagttgaatgatctttgcttctccaatgtctatgcagattcttttgtagtcaagggagatgatgtaagacaaatagcgccaggacaaactggtgttattgctgattataattataaattgccagatgatttcatgggttgtgtccttgcttggaatactaggaacattgatgctacttcaactggtaattataattataaatataggtatcttagacatggcaagcttaggccctttgagagagacatatctaatgtgcctttctcccctgatggcaaaccttgcaccccacctgctcttaattgttattggccattaaatgattatggtttttacaccactactggcattggctaccaaccttacagagttgtagtactttcttttgaacttttaaatgcaccggccacggtttgtggaccaaaattatccactgaccttattaagaaccagtgtgtcaattttaattttaatggactcactggtactggtgtgttaactccttcttcaaagagatttcaaccatttcaacaatttggccgtgatgtttctgatttcactgattccgttcgagatcctaaaacatctgaaatattagacatttcaccttgctcttttgggggtgtaagtgtaattacacctggaacaaatgcttcatctgaagttgctgttctatatcaagatgttaactgcactgatgtttctacagcaattcatgcagatcaactcacaccagcttggcgcatatattctactggaaacaatgtattccagactcaagcaggctgtcttataggagctgagcatgtcgacacttcttatgagtgcgacattcctattggagctggcatttgtgctattaccatacagttagactagaaaagggcgaattctgcagatatccatcacactggcggccgcatcgatgagctctaattaattaaggcttttctgctaacatatagcaatttttgaagaaaggaaagctagaaatacccaatatcttgctgaagcaagatattgggtatttcttttttttttattttgaatctttctattctgaattcagttaacgacgagatttagtatcctttcttgcactttcataactcgtgaaatgccgagttggtacgaattcccccaatttgcgacctaccataggatttgttatgtaaataggtatatgttcctttccattatgaatcgcgattgtatggccaaccattgcgggtagaatgctagatgcccgggaccacgttactattgtttctttctcctccttcatattgagcttttctatttttgccaataaatgatggtacctccccccgccacgatcgaacgggaatggataagaggcttgtgggattgacgtgatagggtagggttggctatactgctggtggcgaactccaggctaataatctgaagcgcttggaagttgtagggaggatccatggcagacaacggtactattaccgttgaggagcttaaacaactcctggaacaatggaacctagtaataggtttcctattcctagcctggattatgttactacaatttgcctattctaatcggaacaggtttttgtacataataaagcttgttttcctctggctcttgtggccagtaacacttgcttgttttgtgcttgctgttgtctacagaattaattgggtgactggcgggattgcgattgcaatggcttgtattgtaggcttgatgtggcttagctacttcgttgcttccttcaggctgtttgctcgtacccgctcaatgtggtcattcaacccagaaacaaacattcttctcaatgtgcctctccgggggacaattgtgaccagaccgctcatggaaagtgaacttgtcattggtgctgtgatcattcgtggtcacttgcgaatggccggacactccctagggcgctgtgacattaaggacctgccaaaagagatcactgtggctacatcacgaacgctttcttattacaaattaggagcgtcgcagcgtgtaggcactgattcaggttttgctgcatacaaccgctaccgtattggaaactataaattaaatacagaccacgccggtagcaacgacaatattgctttgctagtacagtaagaattcaagccgaattccagcacactggcggccgttactagtggatccgagctctaattaattaaggcttttctgctaacatatagcaatttttgaagaaaggaaagctagaaatacccaatatcttgctgaagcaagatattgggtatttcttttttttttattttgaatctttctattctgaattcagttaacgacgagatttagtatcctttcttgcactttcataactcgtgaaatgccgagttggtacgaattcccccaatttgcgacctaccataggatttgttatgtaaataggtatatgttcctttccattatgaatcgcgattgtatggccaaccattgcgggtagaatgctagatgcccgggaccacgttactattgtttctttctcctccttcatattgagcttttctatttttgccaataaatgatggtacctccccccgccacgatcgaacgggaatggataagaggcttgtgggattgacgtgatagggtagggttggctatactgctggtggcgaactccaggctaataatctgaagcgcttggaagttgtagggaggatcctatggctcgtgaagcggttatcgccgaagtatcgactcaactatcagaggtagttggcgtcatcgagcgccatctcgaaccgacgttgctggccgtacatttgtacggctccgcagtggatggcggcctgaagccacacagtgatattgatttgctggttacggtgaccgtaaggcttgatgaaacaacgcggcgagctttgatcaacgaccttttggaaacttcggcttcccctggagagagcgagattctccgcgctgtagaagtcaccattgttgtgcacgacgacatcattccgtggcgttatccagctaagcgcgaactgcaatttggagaatggcagcgcaatgacattcttgcaggtatcttcgagccagccacgatcgacattgatctggctatcttgctgacaaaagcaagagaacatagcgttgccttggtaggtccagcggcggaggaactctttgatccggttcctgaacaggatctatttgaggcgctaaatgaaaccttaacgctatggaactcgccgcccgactgggctggcgatgagcgaaatgtagtgcttacgttgtcccgcatttggtacagcgcagtaaccggcaaaatcgcgccgaaggatgtcgctgccgactgggcaatggagcgcctgccggcccagtatcagcccgtcatacttgaagctagacaggcttatcttggacaagaagaagatcgcttggcctcgcgcgcagatcagttggaagaatttgtccactacgtgaaaggcgagatcactaaggtagttggcaaataactcgagactaagtggataaaattagatagaaaaaaggtctaaataaaaaagaagagaaatagaaagatcaaaaatcagttacgaaaatgcagtaattcttcttttttcttctaattgattgcaattaaactcgtctcaatctgaaaaaagattgagccgagtttaaatagattttgatacgatcatgagacttgacaaatcgggattcctctattctatatatttagaagatataaaggtataatacaataaataaatacaatctagaagctcgatgatccttaggattggtatattcttttctatcctgtagtttgtagtttccctgaatcaagccaagtatcacacctctttctacccatcctgtatattgtcccctttgttccgtgttgaaatagaaccttaatttattacttatttttttattaaattttagatttgttagtgattagatattagtattagacgagattttacgaaacaattatttttttatttctttataggagaggacaaatctcttttttcgatgcgaatttgacacgacataggagaagccgccctttattaaaaattatattattttaaataatataaagggggttccaacatattaatatatagtgaagtgttcccccagattcagaactttttttcaatactcacaatccttattagttaataatcctagtgattggatttctatgcttagtctgataggaaataagatattcaaataaataattttatagcgaatgactattcatctattgtattttcatgcaaatagggggcaagaaaactctatggaaagatggtggtttaattcgatgttgtttaagaaggagttcgaacgcaggtgtgggctaaataaatcaatgggcagtcttggtcctattgaaaataccaatgaagatccaaatcgaaaagtgaaaaacattcatagttggaggaatcgtgacaattctagttgcagtaatgttgattatttattcggcgttaaagacattcggaatttcatctctgatgacacttttttagttagtgataggaatggagacagttattccatctattttgatattgaaaatcatatttttgagattgacaacgatcattcttttctgagtgaactagaaagttctttttatagttatcgaaactcgaattatcggaataatggatttaggggcgaagatccctactataattcttacatgtatgatactcaatatagttggaataatcacattaatagttgcattgatagttatcttcagtctcaaatctgtatagatacttccattataagtggtagtgagaattacggtgacagttacatttatagggccgtttgtggtggtgaaagtcgaaatagtagtgaaaacgagggttccagtagacgaactcgcacgaagggcagtgatttaactataagagaaagttctaatgatctcgaggtaactcaaaaatacaggcatttgtgggttcaatgcgaaaattgttatggattaaattataagaaatttttgaaatcaaaaatgaatatttgtgaacaatgtggatatcatttgaaaatgagtagttcagatagaattcgtaatcatggtcatagctgtttcctgtgtgaaattgttatccgctcacaattccacacaacatacgagccggaagcataaagtgtaaagcctggggtgcctaatgagtgagctaactcacattaattgcgttgcgctcactgcccgctttccagtcgggaaacctgtcgtgccagctgcattaatgaatcggccaacgcgcggggagaggcggtttgcgtattgggcgctcttccgcttcctcgctcactgactcgctgcgctcggtcgttcggctgcggcgagcggtatcagctcactcaaaggcggtaatacggttatccacagaatcaggggataacgcaggaaagaacatgtgagcaaaaggccagcaaaaggccaggaaccgtaaaaaggccgcgttgctggcgtttttccataggctccgcccccctgacgagcatcacaaaaatcgacgctcaagtcagaggtggcgaaacccgacaggactataaagataccaggcgtttccccctggaagctccctcgtgcgctctcctgttccgaccctgccgcttaccggatacctgtccgcctttctcccttcgggaagcgtggcgctttctcatagctcacgctgtaggtatctcagttcggtgtaggtcgttcgctccaagctgggctgtgtgcacgaaccccccgttcagcccgaccgctgcgccttatccggtaactatcgtcttgagtccaacccggtaagacacgacttatcgccactggcagcagccactggtaacaggattagcagagcgaggtatgtaggcggtgctacagagttcttgaagtggtggcctaactacggctacactagaaggacagtatttggtatctgcgctctgctgaagccagttaccttcggaaaaagagttggtagctcttgatccggcaaacaaaccaccgctggtagcggtggtttttttgtttgcaagcagcagattacgcgcagaaaaaaaggatctcaagaagatcctttgatcttttctacggggtctgacgctcagtggaacgaaaactcacgttaagggattttggtcatgagattatcaaaaaggatcttcacctagatccttttaaattaaaaatgaagttttaaatcaatctaaagtatatatgagtaaacttggtctgacagttaccaatgcttaatcagtgaggcacctatctcagcgatctgtctatttcgttcatccatagttgcctgactccccgtcgtgtagataactacgatacgggagggcttaccatctggccccagtgctgcaatgataccgcgagacccacgctcaccggctccagatttatcagcaataaaccagccagccggaagggccgagcgcagaagtggtcctgcaactttatccgcctccatccagtctattaattgttgccgggaagctagagtaagtagttcgccagttaatagtttgcgcaacgttgttgccattgctacaggcatcgtggtgtcacgctcgtcgtttggtatggcttcattcagctccggttcccaacgatcaaggcgagttacatgatcccccatgttgtgcaaaaaagcggttagctccttcggtcctccgatcgttgtcagaagtaagttggccgcagtgttatcactcatggttatggcagcactgcataattctcttactgtcatgccatccgtaagatgcttttctgtgactggtgagtactcaaccaagtcattctgagaatagtgtatgcggcgaccgagttgctcttgcccggcgtcaatacgggataataccgcgccacatagcagaactttaaaagtgctcatcattggaaaacgttcttcggggcgaaaactctcaaggatcttaccgctgttgagatccagttcgatgtaacccactcgtgcacccaactgatcttcagcatcttttactttcaccagcgtttctgggtgagcaaaaacaggaaggcaaaatgccgcaaaaaagggaataagggcgacacggaaatgttgaatactcatactcttcctttttcaatattattgaagcatttatcagggttattgtctcatgagcggatacatatttgaatgtatttagaaaaataaacaaataggggttccgcgcacatttccccgaaaagtgccacctgacgtctaagaaaccattattatcatgacattaacctataaaaataggcgtatcacgaggccctttcgtc

SEQ ID NO: 3594 - protein, 57 aa, Artificial Sequence; identical to SEQ ID NO: 2
  pCV6

SEQ ID NO: 3595 - protein, 13 aa, Artificial Sequence
  pCV6
ECTICGVKYRTDA

SEQ ID NO: 3596 - protein, 41 aa, Artificial Sequence; identical to SEQ ID NO: 4
  pCV6

SEQ ID NO: 3597 - protein, 22 aa, Artificial Sequence
  pCV6
RQGFPSHDVVKRRPVPSLKEIN

SEQ ID NO: 3598 - protein, 43 aa, Artificial Sequence; identical to SEQ ID NO: 6
  pCV6

SEQ ID NO: 3599 - protein, 33 aa, Artificial Sequence; identical to SEQ ID NO: 7
  pCV6

SEQ ID NO: 3600 - protein, 9 aa, Artificial Sequence
  pCV6
MLLQVHAKK

SEQ ID NO: 3601 - protein, 14 aa, Artificial Sequence
  pCV6
SKELYLLENWAFRS

SEQ ID NO: 3602 - protein, 4 aa, Artificial Sequence
  pCV6
CMTT

SEQ ID NO: 3603 - protein, 43 aa, Artificial Sequence; identical to SEQ ID NO: 11
  pCV6

SEQ ID NO: 3604 - protein, 16 aa, Artificial Sequence
  pCV6
QKRYVCLVEIIFTLVP

SEQ ID NO: 3605 - protein, 8 aa, Artificial Sequence
  pCV6
VNLKVKET

SEQ ID NO: 3606 - protein, 48 aa, Artificial Sequence; identical to SEQ ID NO: 14
  pCV6

SEQ ID NO: 3607 - protein, 16 aa, Artificial Sequence
  pCV6
PRSLGMIPYYSSVEEL

SEQ ID NO: 3608 - protein, 10 aa, Artificial Sequence
  pCV6
DILGVMRQVP

SEQ ID NO: 3609 - protein, 26 aa, Artificial Sequence
  pCV6
KLVMKDVILLRKVMKLFARLANGARN

SEQ ID NO: 3610 - protein, 27 aa, Artificial Sequence
  pCV6
LLLVKYGKRSYLILQQWTFWISKNSRH

SEQ ID NO: 3611 - protein, 12 aa, Artificial Sequence
  pCV6
QEIKKDKEKELK

SEQ ID NO: 3612 - protein, 33 aa, Artificial Sequence; identical to SEQ ID NO: 20
  pCV6

SEQ ID NO: 3613 - protein, 18 aa, Artificial Sequence
  pCV6
LSIYLPRYTRFEIQNLEN

SEQ ID NO: 3614 - protein, 31 aa, Artificial Sequence; identical to SEQ ID NO: 22
  pCV6

SEQ ID NO: 3615 - protein, 8 aa, Artificial Sequence
  pCV6
IVSESTYY

SEQ ID NO: 3616 - protein, 5 aa, Artificial Sequence
  pCV6
TSSSE

SEQ ID NO: 3617 - protein, 4 aa, Artificial Sequence
  pCV6
PIST

SEQ ID NO: 3618 - protein, 20 aa, Artificial Sequence
  pCV6
GKSCAMKNASTIWGEVFSLL

SEQ ID NO: 3619 - protein, 58 aa, Artificial Sequence; identical to SEQ ID NO: 27
  pCV6

SEQ ID NO: 3620 - protein, 31 aa, Artificial Sequence; identical to SEQ ID NO: 28
  pCV6

SEQ ID NO: 3621 - protein, 47 aa, Artificial Sequence; identical to SEQ ID NO: 29
  pCV6

SEQ ID NO: 3622 - protein, 16 aa, Artificial Sequence
  pCV6
GGFTILMKFLDQTLFI

SEQ ID NO: 3623 - protein, 52 aa, Artificial Sequence; identical to SEQ ID NO: 31
  pCV6

SEQ ID NO: 3624 - protein, 6 aa, Artificial Sequence
  pCV6
TTSHSR

SEQ ID NO: 3625 - protein, 36 aa, Artificial Sequence; identical to SEQ ID NO: 33
  pCV6

SEQ ID NO: 3626 - protein, 51 aa, Artificial Sequence; identical to SEQ ID NO: 34
  pCV6

SEQ ID NO: 3627 - protein, 10 aa, Artificial Sequence
  pCV6
FVIYLLVLTL

SEQ ID NO: 3628 - protein, 40 aa, Artificial Sequence; identical to SEQ ID NO: 36
  pCV6

SEQ ID NO: 3629 - protein, 56 aa, Artificial Sequence; identical to SEQ ID NO: 37
  pCV6

SEQ ID NO: 3630 - protein, 59 aa, Artificial Sequence; identical to SEQ ID NO: 38
  pCV6

SEQ ID NO: 3631 - protein, 13 aa, Artificial Sequence
  pCV6
MIFASPMSMQILL

SEQ ID NO: 3632 - protein, 5 aa, Artificial Sequence
  pCV6
SREMM

SEQ ID NO: 3633 - protein, 80 aa, Artificial Sequence; identical to SEQ ID NO: 41
  pCV6

SEQ ID NO: 3634 - protein, 18 aa, Artificial Sequence
  pCV6
MIMVFTPLLALATNLTEL

SEQ ID NO: 3635 - protein, 6 aa, Artificial Sequence
  pCV6
YFLLNF

SEQ ID NO: 3636 - protein, 33 aa, Artificial Sequence; identical to SEQ ID NO: 44
  pCV6

SEQ ID NO: 3637 - protein, 32 aa, Artificial Sequence; identical to SEQ ID NO: 45
  pCV6

SEQ ID NO: 3638 - protein, 9 aa, Artificial Sequence
  pCV6
TFHLALLGV

SEQ ID NO: 3639 - protein, 53 aa, Artificial Sequence; identical to SEQ ID NO: 47
  pCV6

SEQ ID NO: 3640 - protein, 25 aa, Artificial Sequence
  pCV6
ELSMSTLLMSATFLLELAFVLLPYS

SEQ ID NO: 3641 - protein, 21 aa, Artificial Sequence
  pCV6
TRKGRILQISITLAAASMSSN

SEQ ID NO: 3642 - protein, 5 aa, Artificial Sequence
  pCV6
LRLFC

SEQ ID NO: 3643 - protein, 29 aa, Artificial Sequence
  pCV6
HIAIFEERKARNTQYLAEARYWVFLFFLF

SEQ ID NO: 3644 - protein, 4 aa, Artificial Sequence
  pCV6
IFLF

SEQ ID NO: 3645 - protein, 56 aa, Artificial Sequence; identical to SEQ ID NO: 53
  pCV6

SEQ ID NO: 3646 - protein, 25 aa, Artificial Sequence
  pCV6
NARCPGPRYYCFFLLLHIELFYFCQ

SEQ ID NO: 3647 - protein, 19 aa, Artificial Sequence
  pCV6
MMVPPPATIEREWIRGLWD

SEQ ID NO: 3648 - protein, 18 aa, Artificial Sequence
  pCV6
RDRVGLAILLVANSRLII

SEQ ID NO: 3649 - protein, 5 aa, Artificial Sequence
  pCV6
SAWKL

SEQ ID NO: 3650 - protein, 224 aa, Artificial Sequence
  pCV6
GGSMADNGTITVEELKQLLEQWNLVIGFLFLAWIMLLQFAYSNRNRFLYIIKLVFLWLLWPVTLACFVLAVVYRINWVTGGIAIAMACIVGLMWLSYFVASFRLFARTRSMWSFNPETNILLNVPLRGTIVTRPLMESELVIGAVIIRGHLRMAGHSLGRCDIKDLPKEITVATSRTLSYYKLGASQRVGTDSGFAAYNRYRIGNYKLNTDHAGSNDNIALLVQ

SEQ ID NO: 3651 - protein, 18 aa, Artificial Sequence
  pCV6
EFKPNSSTLAAVTSGSEL

SEQ ID NO: 3652 - protein, 12 aa, Artificial Sequence
  pCV6
LIKAFLLTYSNF

SEQ ID NO: 3653 - protein, 4 aa, Artificial Sequence
  pCV6
RKES

SEQ ID NO: 3654 - protein, 6 aa, Artificial Sequence
  pCV6
KYPISC

SEQ ID NO: 3655 - protein, 24 aa, Artificial Sequence
  pCV6
SKILGISFFFILNLSILNSVNDEI

SEQ ID NO: 3656 - protein, 9 aa, Artificial Sequence
  pCV6
YPFLHFHNS

SEQ ID NO: 3657 - protein, 14 aa, Artificial Sequence
  pCV6
NAELVRIPPICDLP

SEQ ID NO: 3658 - protein, 5 aa, Artificial Sequence
  pCV6
DLLCK

SEQ ID NO: 3659 - protein, 20 aa, Artificial Sequence
  pCV6
VYVPFHYESRLYGQPLRVEC

SEQ ID NO: 3660 - protein, 15 aa, Artificial Sequence
  pCV6
MPGTTLLLFLSPPSY

SEQ ID NO: 3661 - protein, 28 aa, Artificial Sequence
  pCV6
AFLFLPINDGTSPRHDRTGMDKRLVGLT

SEQ ID NO: 3662 - protein, 42 aa, Artificial Sequence; identical to SEQ ID NO: 301
  pCV6

SEQ ID NO: 3663 - protein, 25 aa, Artificial Sequence
  pCV6
LASSSAISNRRCWPYICTAPQWMAA

SEQ ID NO: 3664 - protein, 11 aa, Artificial Sequence
  pCV6
SHTVILICWLR

SEQ ID NO: 3665 - protein, 9 aa, Artificial Sequence
  pCV6
GLMKQRGEL

SEQ ID NO: 3666 - protein, 19 aa, Artificial Sequence
  pCV6
STTFWKLRLPLERARFSAL

SEQ ID NO: 3667 - protein, 48 aa, Artificial Sequence; identical to SEQ ID NO: 306
  pCV6

SEQ ID NO: 3668 - protein, 10 aa, Artificial Sequence
  pCV6
QKQENIALPW

SEQ ID NO: 3669 - protein, 19 aa, Artificial Sequence
  pCV6
VQRRRNSLIRFLNRIYLRR

SEQ ID NO: 3670 - protein, 15 aa, Artificial Sequence
  pCV6
RYGTRRPTGLAMSEM

SEQ ID NO: 3671 - protein, 11 aa, Artificial Sequence
  pCV6
CLRCPAFGTAQ

SEQ ID NO: 3672 - protein, 54 aa, Artificial Sequence; identical to SEQ ID NO: 311
  pCV6

SEQ ID NO: 3673 - protein, 6 aa, Artificial Sequence
  pCV6
KARSLR

SEQ ID NO: 3674 - protein, 9 aa, Artificial Sequence
  pCV6
LANNSRLSG

SEQ ID NO: 3675 - protein, 6 aa, Artificial Sequence
  pCV6
IEKRSK

SEQ ID NO: 3676 - protein, 23 aa, Artificial Sequence
  pCV6
KRREIERSKISYENAVILLFSSN

SEQ ID NO: 3677 - protein, 15 aa, Artificial Sequence
  pCV6
LQLNSSQSEKRLSRV

SEQ ID NO: 3678 - protein, 25 aa, Artificial Sequence
  pCV6
IDFDTIMRLDKSGFLYSIYLEDIKV

SEQ ID NO: 3679 - protein, 18 aa, Artificial Sequence
  pCV6
IQSRSSMILRIGIFFSIL

SEQ ID NO: 3680 - protein, 30 aa, Artificial Sequence; identical to SEQ ID NO: 319
  pCV6

SEQ ID NO: 3681 - protein, 9 aa, Artificial Sequence
  pCV6
FITYFFIKF

SEQ ID NO: 3682 - protein, 30 aa, Artificial Sequence; identical to SEQ ID NO: 321
  pCV6

SEQ ID NO: 3683 - protein, 9 aa, Artificial Sequence
  pCV6
HDIGEAALY

SEQ ID NO: 3684 - protein, 6 aa, Artificial Sequence
  pCV6
KLYYFK

SEQ ID NO: 3685 - protein, 29 aa, Artificial Sequence
  pCV6
YKGGSNILIYSEVFPQIQNFFSILTILIS

SEQ ID NO: 3686 - protein, 5 aa, Artificial Sequence
  pCV6
LDFYA

SEQ ID NO: 3687 - protein, 4 aa, Artificial Sequence
  pCV6
SDRK

SEQ ID NO: 3688 - protein, 20 aa, Artificial Sequence
  pCV6
DIQINNFIANDYSSIVFSCK

SEQ ID NO: 3689 - protein, 11 aa, Artificial Sequence
  pCV6
GARKLYGKMVV

SEQ ID NO: 3690 - protein, 4 aa, Artificial Sequence
  pCV6
FDVV

SEQ ID NO: 3691 - protein, 10 aa, Artificial Sequence
  pCV6
EGVRTQVWAK

SEQ ID NO: 3692 - protein, 8 aa, Artificial Sequence
  pCV6
INGQSWSY

SEQ ID NO: 3693 - protein, 10 aa, Artificial Sequence
  pCV6
RSKSKSEKHS

SEQ ID NO: 3694 - protein, 4 aa, Artificial Sequence
  pCV6
LEES

SEQ ID NO: 3695 - protein, 5 aa, Artificial Sequence
  pCV6
LFIRR

SEQ ID NO: 3696 - protein, 7 aa, Artificial Sequence
  pCV6
RHSEFHL

SEQ ID NO: 3697 - protein, 4 aa, Artificial Sequence
  pCV6
HFFS

SEQ ID NO: 3698 - protein, 9 aa, Artificial Sequence
  pCV6
EWRQLFHLF

SEQ ID NO: 3699 - protein, 4 aa, Artificial Sequence
  pCV6
KSYF

SEQ ID NO: 3700 - protein, 7 aa, Artificial Sequence
  pCV6
QRSFFSE

SEQ ID NO: 3701 - protein, 6 aa, Artificial Sequence
  pCV6
TRKFFL

SEQ ID NO: 3702 - protein, 8 aa, Artificial Sequence
  pCV6
LSKLELSE

SEQ ID NO: 3703 - protein, 6 aa, Artificial Sequence
  pCV6
GRRSLL

SEQ ID NO: 3704 - protein, 4 aa, Artificial Sequence
  pCV6
FLHV

SEQ ID NO: 3705 - protein, 15 aa, Artificial Sequence
  pCV6
LSSVSNLYRYFHYKW

SEQ ID NO: 3706 - protein, 4 aa, Artificial Sequence
  pCV6
QLHL

SEQ ID NO: 3707 - protein, 5 aa, Artificial Sequence
  pCV6
GRLWW

SEQ ID NO: 3708 - protein, 5 aa, Artificial Sequence
  pCV6
KRGFQ

SEQ ID NO: 3709 - protein, 7 aa, Artificial Sequence
  pCV6
TNSHEGQ

SEQ ID NO: 3710 - protein, 7 aa, Artificial Sequence
  pCV6
FNYKRKF

SEQ ID NO: 3711 - protein, 22 aa, Artificial Sequence
  pCV6
SRGNSKIQAFVGSMRKLLWIKL

SEQ ID NO: 3712 - protein, 10 aa, Artificial Sequence
  pCV6
EIFEIKNEYL

SEQ ID NO: 3713 - protein, 9 aa, Artificial Sequence
  pCV6
TMWISFENE

SEQ ID NO: 3714 - protein, 4 aa, Artificial Sequence
  pCV6
LFPV

SEQ ID NO: 3715 - protein, 23 aa, Artificial Sequence
  pCV6
NCYPLTIPHNIRAGSIKCKAWGA

SEQ ID NO: 3716 - protein, 22 aa, Artificial Sequence
  pCV6
LTLIALRSLPAFQSGNLSCQLH

SEQ ID NO: 3717 - protein, 56 aa, Artificial Sequence; identical to SEQ ID NO: 356
  pCV6

SEQ ID NO: 3718 - protein, 44 aa, Artificial Sequence; identical to SEQ ID NO: 357
  pCV6

SEQ ID NO: 3719 - protein, 48 aa, Artificial Sequence; identical to SEQ ID NO: 358
  pCV6

SEQ ID NO: 3720 - protein, 92 aa, Artificial Sequence; identical to SEQ ID NO: 359
  pCV6

SEQ ID NO: 3721 - protein, 46 aa, Artificial Sequence; identical to SEQ ID NO: 360
  pCV6

SEQ ID NO: 3722 - protein, 13 aa, Artificial Sequence
  pCV6
GILVMRLSKRIFT

SEQ ID NO: 3723 - protein, 4 aa, Artificial Sequence
  pCV6
ILLN

SEQ ID NO: 3724 - protein, 5 aa, Artificial Sequence
  pCV6
SFKSI

SEQ ID NO: 3725 - protein, 4 aa, Artificial Sequence
  pCV6
SIYE

SEQ ID NO: 3726 - protein, 27 aa, Artificial Sequence
  pCV6
TWSDSYQCLISEAPISAICLFRSSIVA

SEQ ID NO: 3727 - protein, 4 aa, Artificial Sequence
  pCV6
LPVV

SEQ ID NO: 3728 - protein, 103 aa, Artificial Sequence; identical to SEQ ID NO: 367
  pCV6

SEQ ID NO: 3729 - protein, 58 aa, Artificial Sequence; identical to SEQ ID NO: 368
  pCV6

SEQ ID NO: 3730 - protein, 50 aa, Artificial Sequence; identical to SEQ ID NO: 369
  pCV6

SEQ ID NO: 3731 - protein, 6 aa, Artificial Sequence
  pCV6
PTRAPN

SEQ ID NO: 3732 - protein, 12 aa, Artificial Sequence
  pCV6
SSASFTFTSVSG

SEQ ID NO: 3733 - protein, 19 aa, Artificial Sequence
  pCV6
AKTGRQNAAKKGIRATRKC

SEQ ID NO: 3734 - protein, 10 aa, Artificial Sequence
  pCV6
ILILFLFQYY

SEQ ID NO: 3735 - protein, 17 aa, Artificial Sequence
  pCV6
SIYQGYCLMSGYIFECI

SEQ ID NO: 3736 - protein, 19 aa, Artificial Sequence
  pCV6
KNKQIGVPRTFPRKVPPDV

SEQ ID NO: 3737 - protein, 20 aa, Artificial Sequence
  pCV6
ETIIIMTLTYKNRRITRPFR

SEQ ID NO: 3738 - DNA, 10591 bp, Artificial Sequence; identical to SEQ ID NO: 3593
  pCV6
  CDS (2)..(10591)

SEQ ID NO: 3739 - protein, 4 aa, Artificial Sequence
  pCV6
RAFR

SEQ ID NO: 3740 - protein, 39 aa, Artificial Sequence; identical to SEQ ID NO: 115
  pCV6

SEQ ID NO: 3741 - protein, 16 aa, Artificial Sequence
  pCV6
LCGIRADCTESAPYAV

SEQ ID NO: 3742 - protein, 61 aa, Artificial Sequence; identical to SEQ ID NO: 117
  pCV6

SEQ ID NO: 3743 - protein, 7 aa, Artificial Sequence
  pCV6
NDGQCQA

SEQ ID NO: 3744 - protein, 13 aa, Artificial Sequence
  pCV6
IEQVWSSPVGMYY

SEQ ID NO: 3745 - protein, 5 aa, Artificial Sequence
  pCV6
IGVIC

SEQ ID NO: 3746 - protein, 6 aa, Artificial Sequence
  pCV6
MSSRWT

SEQ ID NO: 3747 - protein, 22 aa, Artificial Sequence
  pCV6
ERELTTIYALERSFLILCRSTL

SEQ ID NO: 3748 - protein, 23 aa, Artificial Sequence
  pCV6
NQRALLECYCRYMRRNDQKSCIC

SEQ ID NO: 3749 - protein, 9 aa, Artificial Sequence
  pCV6
RIGRSDRNA

SEQ ID NO: 3750 - protein, 10 aa, Artificial Sequence
  pCV6
LLNGGIHRKY

SEQ ID NO: 3751 - protein, 7 aa, Artificial Sequence
  pCV6
LGSLLPR

SEQ ID NO: 3752 - protein, 14 aa, Artificial Sequence
  pCV6
WSTSSHPPCNACGY

SEQ ID NO: 3753 - protein, 30 aa, Artificial Sequence; identical to SEQ ID NO: 128
  pCV6

SEQ ID NO: 3754 - protein, 8 aa, Artificial Sequence
  pCV6
KRHNFGLC

SEQ ID NO: 3755 - protein, 41 aa, Artificial Sequence; identical to SEQ ID NO: 130
  pCV6

SEQ ID NO: 3756 - protein, 15 aa, Artificial Sequence
  pCV6
FRTTVRWRNFRTSLG

SEQ ID NO: 3757 - protein, 6 aa, Artificial Sequence
  pCV6
CARCRS

SEQ ID NO: 3758 - protein, 11 aa, Artificial Sequence
  pCV6
SSSSRSMCKSS

SEQ ID NO: 3759 - protein, 5 aa, Artificial Sequence
  pCV6
SCSGR

SEQ ID NO: 3760 - protein, 16 aa, Artificial Sequence
  pCV6
NYSRGLQMEPGTSCCL

SEQ ID NO: 3761 - protein, 7 aa, Artificial Sequence
  pCV6
SMERDRI

SEQ ID NO: 3762 - protein, 8 aa, Artificial Sequence
  pCV6
FCSSGRFG

SEQ ID NO: 3763 - protein, 8 aa, Artificial Sequence
  pCV6
VKTVDISR

SEQ ID NO: 3764 - protein, 4 aa, Artificial Sequence
  pCV6
ISRK

SEQ ID NO: 3765 - protein, 15 aa, Artificial Sequence
  pCV6
RRIRRKNSSNYPSFS

SEQ ID NO: 3766 - protein, 4 aa, Artificial Sequence
  pCV6
LNCN

SEQ ID NO: 3767 - protein, 23 aa, Artificial Sequence
  pCV6
TRPNLLLKGLSRIQQRFYCIYFD

SEQ ID NO: 3768 - protein, 14 aa, Artificial Sequence
  pCV6
VYTYLDIQDLKYKI

SEQ ID NO: 3769 - protein, 40 aa, Artificial Sequence; identical to SEQ ID NO: 144
  pCV6

SEQ ID NO: 3770 - protein, 29 aa, Artificial Sequence
  pCV6
VNQLTTKKISRLPLRNRNSLFLHRESRVQ

SEQ ID NO: 3771 - protein, 17 aa, Artificial Sequence
  pCV6
KMQARFGERFFLYCNKE

SEQ ID NO: 3772 - protein, 6 aa, Artificial Sequence
  pCV6
LSTPSD

SEQ ID NO: 3773 - protein, 12 aa, Artificial Sequence
  pCV6
FRVRVPGNPYGN

SEQ ID NO: 3774 - protein, 4 aa, Artificial Sequence
  pCV6
KGAI

SEQ ID NO: 3775 - protein, 15 aa, Artificial Sequence
  pCV6
VLIFHSLHLQNFLVW

SEQ ID NO: 3776 - protein, 18 aa, Artificial Sequence
  pCV6
ILLYGYTTVGAGLVDIGI

SEQ ID NO: 3777 - protein, 5 aa, Artificial Sequence
  pCV6
SILYC

SEQ ID NO: 3778 - protein, 8 aa, Artificial Sequence
  pCV6
ITSLLLSF

SEQ ID NO: 3779 - protein, 34 aa, Artificial Sequence; identical to SEQ ID NO: 154
  pCV6

SEQ ID NO: 3780 - protein, 5 aa, Artificial Sequence
  pCV6
PVHHF

SEQ ID NO: 3781 - protein, 4 aa, Artificial Sequence
  pCV6
CSSS

SEQ ID NO: 3782 - protein, 14 aa, Artificial Sequence
  pCV6
LHSTYFIYEGGLLS

SEQ ID NO: 3783 - protein, 16 aa, Artificial Sequence
  pCV6
IRHSLFNSGFISSILF

SEQ ID NO: 3784 - protein, 7 aa, Artificial Sequence
  pCV6
CYRVSYY

SEQ ID NO: 3785 - protein, 10 aa, Artificial Sequence
  pCV6
SYVWQPCHTF

SEQ ID NO: 3786 - protein, 33 aa, Artificial Sequence; identical to SEQ ID NO: 161
  pCV6

SEQ ID NO: 3787 - protein, 6 aa, Artificial Sequence
  pCV6
CCYTSM

SEQ ID NO: 3788 - protein, 7 aa, Artificial Sequence
  pCV6
QPFLCCF

SEQ ID NO: 3789 - protein, 12 aa, Artificial Sequence
  pCV6
THGYTDTYYDIR

SEQ ID NO: 3790 - protein, 7 aa, Artificial Sequence
  pCV6
LHFRVHI

SEQ ID NO: 3791 - protein, 4 aa, Artificial Sequence
  pCV6
CLFA

SEQ ID NO: 3792 - protein, 6 aa, Artificial Sequence
  pCV6
CFRKVR

SEQ ID NO: 3793 - protein, 7 aa, Artificial Sequence
  pCV6
TLTRVCV

SEQ ID NO: 3794 - protein, 7 aa, Artificial Sequence
  pCV6
RWVSLCL

SEQ ID NO: 3795 - protein, 9 aa, Artificial Sequence
  pCV6
GLSTYRCSS

SEQ ID NO: 3796 - protein, 5 aa, Artificial Sequence
  pCV6
STFWF

SEQ ID NO: 3797 - protein, 6 aa, Artificial Sequence
  pCV6
HFETYF

SEQ ID NO: 3798 - protein, 5 aa, Artificial Sequence
  pCV6
VASWY

SEQ ID NO: 3799 - protein, 4 aa, Artificial Sequence
  pCV6
HYKF

SEQ ID NO: 3800 - protein, 34 aa, Artificial Sequence; identical to SEQ ID NO: 175
  pCV6

SEQ ID NO: 3801 - protein, 8 aa, Artificial Sequence
  pCV6
KWYNHRCC

SEQ ID NO: 3802 - protein, 7 aa, Artificial Sequence
  pCV6
LFSKSTC

SEQ ID NO: 3803 - protein, 5 aa, Artificial Sequence
  pCV6
TQMLC

SEQ ID NO: 3804 - protein, 7 aa, Artificial Sequence
  pCV6
QRNLPDL

SEQ ID NO: 3805 - protein, 13 aa, Artificial Sequence
  pCV6
FQGCSLRRCCEIP

SEQ ID NO: 3806 - protein, 11 aa, Artificial Sequence
  pCV6
YYKLVSFWRGF

SEQ ID NO: 3807 - protein, 13 aa, Artificial Sequence
  pCV6
IPFCLCMGEKKNF

SEQ ID NO: 3808 - protein, 13 aa, Artificial Sequence
  pCV6
LLCALQLNIFFNL

SEQ ID NO: 3809 - protein, 7 aa, Artificial Sequence
  pCV6
VLWRFCH

SEQ ID NO: 3810 - protein, 16 aa, Artificial Sequence
  pCV6
SLLLQCLCRFFCSQGR

SEQ ID NO: 3811 - protein, 13 aa, Artificial Sequence
  pCV6
CKTNSARTNWCYC

SEQ ID NO: 3812 - protein, 10 aa, Artificial Sequence
  pCV6
FHGLCPCLEY

SEQ ID NO: 3813 - protein, 5 aa, Artificial Sequence
  pCV6
CYFNW

SEQ ID NO: 3814 - protein, 4 aa, Artificial Sequence
  pCV6
TWQA

SEQ ID NO: 3815 - protein, 4 aa, Artificial Sequence
  pCV6
ERHI

SEQ ID NO: 3816 - protein, 5 aa, Artificial Sequence
  pCV6
CAFLP

SEQ ID NO: 3817 - protein, 9 aa, Artificial Sequence
  pCV6
WQTLHPTCS

SEQ ID NO: 3818 - protein, 6 aa, Artificial Sequence
  pCV6
LLLAIK

SEQ ID NO: 3819 - protein, 21 aa, Artificial Sequence
  pCV6
LWFLHHYWHWLPTLQSCSTFF

SEQ ID NO: 3820 - protein, 15 aa, Artificial Sequence
  pCV6
TFKCTGHGLWTKIIH

SEQ ID NO: 3821 - protein, 6 aa, Artificial Sequence
  pCV6
EPVCQF

SEQ ID NO: 3822 - protein, 23 aa, Artificial Sequence
  pCV6
WTHWYWCVNSFFKEISTISTIWP

SEQ ID NO: 3823 - protein, 5 aa, Artificial Sequence
  pCV6
FRSRS

SEQ ID NO: 3824 - protein, 23 aa, Artificial Sequence
  pCV6
NIRHFTLLFWGCKCNYTWNKCFI

SEQ ID NO: 3825 - protein, 8 aa, Artificial Sequence
  pCV6
SCCSISRC

SEQ ID NO: 3826 - protein, 34 aa, Artificial Sequence; identical to SEQ ID NO: 201
  pCV6

SEQ ID NO: 3827 - protein, 6 aa, Artificial Sequence
  pCV6
ACRHFL

SEQ ID NO: 3828 - protein, 34 aa, Artificial Sequence; identical to SEQ ID NO: 203
  pCV6

SEQ ID NO: 3829 - protein, 4 aa, Artificial Sequence
  pCV6
ALIN

SEQ ID NO: 3830 - protein, 6 aa, Artificial Sequence
  pCV6
GFSANI

SEQ ID NO: 3831 - protein, 35 aa, Artificial Sequence; identical to SEQ ID NO: 206
  pCV6

SEQ ID NO: 3832 - protein, 11 aa, Artificial Sequence
  pCV6
RRDLVSFLALS

SEQ ID NO: 3833 - protein, 21 aa, Artificial Sequence
  pCV6
LVKCRVGTNSPNLRPTIGFVM

SEQ ID NO: 3834 - protein, 8 aa, Artificial Sequence
  pCV6
IGICSFPL

SEQ ID NO: 3835 - protein, 37 aa, Artificial Sequence; identical to SEQ ID NO: 210
  pCV6

SEQ ID NO: 3836 - protein, 12 aa, Artificial Sequence
  pCV6
WYLPPPRSNGNG

SEQ ID NO: 3837 - protein, 9 aa, Artificial Sequence
  pCV6
EACGIDVIG

SEQ ID NO: 3838 - protein, 11 aa, Artificial Sequence
  pCV6
GWLYCWWRTPG

SEQ ID NO: 3839 - protein, 31 aa, Artificial Sequence
  pCV6
SEALGSCREDPWQTTVLLPLRSLNNSWNNGT

SEQ ID NO: 3840 - protein, 4 aa, Artificial Sequence
  pCV6
VSYS

SEQ ID NO: 3841 - protein, 18 aa, Artificial Sequence
  pCV6
PGLCYYNLPILIGTGFCT

SEQ ID NO: 3842 - protein, 10 aa, Artificial Sequence
  pCV6
SLFSSGSCGQ

SEQ ID NO: 3843 - protein, 15 aa, Artificial Sequence
  pCV6
HLLVLCLLLSTELIG

SEQ ID NO: 3844 - protein, 11 aa, Artificial Sequence
  pCV6
LAGLRLQWLVL

SEQ ID NO: 3845 - protein, 38 aa, Artificial Sequence; identical to SEQ ID NO: 412
  pCV6

SEQ ID NO: 3846 - protein, 13 aa, Artificial Sequence
  pCV6
PDRSWKVNLSLVL

SEQ ID NO: 3847 - protein, 12 aa, Artificial Sequence
  pCV6
SFVVTCEWPDTP

SEQ ID NO: 3848 - protein, 24 aa, Artificial Sequence
  pCV6
GAVTLRTCQKRSLWLHHERFLITN

SEQ ID NO: 3849 - protein, 5 aa, Artificial Sequence
  pCV6
ERRSV

SEQ ID NO: 3850 - protein, 18 aa, Artificial Sequence
  pCV6
ALIQVLLHTTATVLETIN

SEQ ID NO: 3851 - protein, 13 aa, Artificial Sequence
  pCV6
IQTTPVATTILLC

SEQ ID NO: 3852 - protein, 22 aa, Artificial Sequence
  pCV6
YSKNSSRIPAHWRPLLVDPSSN

SEQ ID NO: 3853 - protein, 5 aa, Artificial Sequence
  pCV6
LRLFC

SEQ ID NO: 3854 - protein, 29 aa, Artificial Sequence
  pCV6
HIAIFEERKARNTQYLAEARYWVFLFFLF

SEQ ID NO: 3855 - protein, 4 aa, Artificial Sequence
  pCV6
IFLF

SEQ ID NO: 3856 - protein, 56 aa, Artificial Sequence; identical to SEQ ID NO: 53
  pCV6

SEQ ID NO: 3857 - protein, 25 aa, Artificial Sequence
  pCV6
NARCPGPRYYCFFLLLHIELFYFCQ

SEQ ID NO: 3858 - protein, 19 aa, Artificial Sequence
  pCV6
MMVPPPATIEREWIRGLWD

SEQ ID NO: 3859 - protein, 18 aa, Artificial Sequence
  pCV6
RDRVGLAILLVANSRLII

SEQ ID NO: 3860 - protein, 5 aa, Artificial Sequence
  pCV6
SAWKL

SEQ ID NO: 3861 - protein, 6 aa, Artificial Sequence
  pCV6
GGSYGS

SEQ ID NO: 3862 - protein, 43 aa, Artificial Sequence; identical to SEQ ID NO: 59
  pCV6

SEQ ID NO: 3863 - protein, 9 aa, Artificial Sequence
  pCV6
FAGYGDRKA

SEQ ID NO: 3864 - protein, 43 aa, Artificial Sequence; identical to SEQ ID NO: 61
  pCV6

SEQ ID NO: 3865 - protein, 11 aa, Artificial Sequence
  pCV6
ARTAIWRMAAQ

SEQ ID NO: 3866 - protein, 13 aa, Artificial Sequence
  pCV6
HSCRYLRASHDRH

SEQ ID NO: 3867 - protein, 11 aa, Artificial Sequence
  pCV6
SGYLADKSKRT

SEQ ID NO: 3868 - protein, 12 aa, Artificial Sequence
  pCV6
RCLGRSSGGGTL

SEQ ID NO: 3869 - protein, 4 aa, Artificial Sequence
  pCV6
TGSI

SEQ ID NO: 3870 - protein, 14 aa, Artificial Sequence
  pCV6
NLNAMELAARLGWR

SEQ ID NO: 3871 - protein, 42 aa, Artificial Sequence; identical to SEQ ID NO: 68
  pCV6

SEQ ID NO: 3872 - protein, 30 aa, Artificial Sequence; identical to SEQ ID NO: 69
  pCV6

SEQ ID NO: 3873 - protein, 8 aa, Artificial Sequence
  pCV6
GSWQITRD

SEQ ID NO: 3874 - protein, 5 aa, Artificial Sequence
  pCV6
VDKIR

SEQ ID NO: 3875 - protein, 10 aa, Artificial Sequence
  pCV6
KKGLNKKEEK

SEQ ID NO: 3876 - protein, 10 aa, Artificial Sequence
  pCV6
KDQKSVTKMQ

SEQ ID NO: 3877 - protein, 10 aa, Artificial Sequence
  pCV6
FFFFLLIDCN

SEQ ID NO: 3878 - protein, 8 aa, Artificial Sequence
  pCV6
TRLNLKKD

SEQ ID NO: 3879 - protein, 4 aa, Artificial Sequence
  pCV6
AEFK

SEQ ID NO: 3880 - protein, 5 aa, Artificial Sequence
  pCV6
ILIRS

SEQ ID NO: 3881 - protein, 12 aa, Artificial Sequence
  pCV6
DLTNRDSSILYI

SEQ ID NO: 3882 - protein, 13 aa, Artificial Sequence
  pCV6
RYNTINKYNLEAR

SEQ ID NO: 3883 - protein, 13 aa, Artificial Sequence
  pCV6
SLGLVYSFLSCSL

SEQ ID NO: 3884 - protein, 22 aa, Artificial Sequence
  pCV6
IKPSITPLSTHPVYCPLCSVLK

SEQ ID NO: 3885 - protein, 17 aa, Artificial Sequence
  pCV6
NLNLLLIFLLNFRFVSD

SEQ ID NO: 3886 - protein, 17 aa, Artificial Sequence
  pCV6
ILVLDEILRNNYFFISL

SEQ ID NO: 3887 - protein, 14 aa, Artificial Sequence
  pCV6
ERTNLFFRCEFDTT

SEQ ID NO: 3888 - protein, 21 aa, Artificial Sequence
  pCV6
EKPPFIKNYIILNNIKGVPTY

SEQ ID NO: 3889 - protein, 40 aa, Artificial Sequence; identical to SEQ ID NO: 86
  pCV6

SEQ ID NO: 3890 - protein, 308 aa, Artificial Sequence; identical to SEQ ID NO: 87
  pCV6

SEQ ID NO: 3891 - protein, 9 aa, Artificial Sequence
  pCV6
SVKPGVPNE

SEQ ID NO: 3892 - protein, 4 aa, Artificial Sequence
  pCV6
ANSH

SEQ ID NO: 3893 - protein, 61 aa, Artificial Sequence; identical to SEQ ID NO: 90
  pCV6

SEQ ID NO: 3894 - protein, 141 aa, Artificial Sequence; identical to SEQ ID NO: 91
  pCV6

SEQ ID NO: 3895 - protein, 20 aa, Artificial Sequence
  pCV6
DTTYRHWQQPLVTGLAERGM

SEQ ID NO: 3896 - protein, 6 aa, Artificial Sequence
  pCV6
AVLQSS

SEQ ID NO: 3897 - protein, 19 aa, Artificial Sequence
  pCV6
SGGLTTATLEGQYLVSALC

SEQ ID NO: 3898 - protein, 43 aa, Artificial Sequence; identical to SEQ ID NO: 95
  pCV6

SEQ ID NO: 3899 - protein, 20 aa, Artificial Sequence
  pCV6
SFLRGLTLSGTKTHVKGFWS

SEQ ID NO: 3900 - protein, 11 aa, Artificial Sequence
  pCV6
DYQKGSSPRSF

SEQ ID NO: 3901 - protein, 23 aa, Artificial Sequence
  pCV6
IKNEVLNQSKVYMSKLGLTVTNA

SEQ ID NO: 3902 - protein, 15 aa, Artificial Sequence
  pCV6
SVRHLSQRSVYFVHP

SEQ ID NO: 3903 - protein, 8 aa, Artificial Sequence
  pCV6
LPDSPSCR

SEQ ID NO: 3904 - protein, 14 aa, Artificial Sequence
  pCV6
LRYGRAYHLAPVLQ

SEQ ID NO: 3905 - protein, 14 aa, Artificial Sequence
  pCV6
YRETHAHRLQIYQQ

SEQ ID NO: 3906 - protein, 30 aa, Artificial Sequence; identical to SEQ ID NO: 103
  pCV6

SEQ ID NO: 3907 - protein, 85 aa, Artificial Sequence; identical to SEQ ID NO: 104
  pCV6

SEQ ID NO: 3908 - protein, 4 aa, Artificial Sequence
  pCV6
DAFL

SEQ ID NO: 3909 - protein, 35 aa, Artificial Sequence; identical to SEQ ID NO: 106
  pCV6

SEQ ID NO: 3910 - protein, 20 aa, Artificial Sequence
  pCV6
KCSSLENVLRGENSQGSYRC

SEQ ID NO: 3911 - protein, 38 aa, Artificial Sequence; identical to SEQ ID NO: 108
  pCV6

SEQ ID NO: 3912 - protein, 26 aa, Artificial Sequence
  pCV6
GRHGNVEYSYSSFFNIIEAFIRVIVS

SEQ ID NO: 3913 - protein, 13 aa, Artificial Sequence
  pCV6
ADTYLNVFRKINK

SEQ ID NO: 3914 - protein, 20 aa, Artificial Sequence
  pCV6
GFRAHFPEKCHLTSKKPLLS

SEQ ID NO: 3915 - protein, 12 aa, Artificial Sequence
  pCV6
PIKIGVSRGPFV

SEQ ID NO: 3916 - DNA, 10591 bp, Artificial Sequence; identical to SEQ ID NO: 3593
  pCV6
  CDS (3)..(10589)

SEQ ID NO: 3917 - protein, 10 aa, Artificial Sequence
  pCV6
ARFGDDGENL

SEQ ID NO: 3918 - protein, 12 aa, Artificial Sequence
  pCV6
HMQLPETVTACL

SEQ ID NO: 3919 - protein, 430 aa, Artificial Sequence; identical to SEQ ID NO: 277
  pCV6

SEQ ID NO: 3920 - protein, 12 aa, Artificial Sequence
  pCV6
TLADKLAGNKEG

SEQ ID NO: 3921 - protein, 13 aa, Artificial Sequence
  pCV6
GERTQVIILRSLN

SEQ ID NO: 3922 - protein, 10 aa, Artificial Sequence
  pCV6
IAIKLGPIFY

SEQ ID NO: 3923 - protein, 18 aa, Artificial Sequence
  pCV6
AEYNKDSIAYILTKYILT

SEQ ID NO: 3924 - protein, 4 aa, Artificial Sequence
  pCV6
IYKI

SEQ ID NO: 3925 - protein, 36 aa, Artificial Sequence; identical to SEQ ID NO: 283
  pCV6

SEQ ID NO: 3926 - protein, 10 aa, Artificial Sequence
  pCV6
NVLCTIINSK

SEQ ID NO: 3927 - protein, 73 aa, Artificial Sequence; identical to SEQ ID NO: 285
  pCV6

SEQ ID NO: 3928 - protein, 39 aa, Artificial Sequence; identical to SEQ ID NO: 286
  pCV6

SEQ ID NO: 3929 - protein, 8 aa, Artificial Sequence
  pCV6
QAFYYLSS

SEQ ID NO: 3930 - protein, 9 aa, Artificial Sequence
  pCV6
YVCLGVLAI

SEQ ID NO: 3931 - protein, 676 aa, Artificial Sequence; identical to SEQ ID NO: 289
  pCV6

SEQ ID NO: 3932 - protein, 18 aa, Artificial Sequence
  pCV6
KRANSADIHHTGGRIDEL

SEQ ID NO: 3933 - protein, 12 aa, Artificial Sequence
  pCV6
LIKAFLLTYSNF

SEQ ID NO: 3934 - protein, 4 aa, Artificial Sequence
  pCV6
RKES

SEQ ID NO: 3935 - protein, 6 aa, Artificial Sequence
  pCV6
KYPISC

SEQ ID NO: 3936 - protein, 24 aa, Artificial Sequence
  pCV6
SKILGISFFFILNLSILNSVNDEI

SEQ ID NO: 3937 - protein, 9 aa, Artificial Sequence
  pCV6
YPFLHFHNS

SEQ ID NO: 3938 - protein, 14 aa, Artificial Sequence
  pCV6
NAELVRIPPICDLP

SEQ ID NO: 3939 - protein, 5 aa, Artificial Sequence
  pCV6
DLLCK

SEQ ID NO: 3940 - protein, 20 aa, Artificial Sequence
  pCV6
VYVPFHYESRLYGQPLRVEC

SEQ ID NO: 3941 - protein, 15 aa, Artificial Sequence
  pCV6
MPGTTLLLFLSPPSY

SEQ ID NO: 3942 - protein, 28 aa, Artificial Sequence
  pCV6
AFLFLPINDGTSPRHDRTGMDKRLVGLT

SEQ ID NO: 3943 - protein, 34 aa, Artificial Sequence
  pCV6
GRVGYTAGGELQANNLKRLEVVGRIHGRQRYYYR

SEQ ID NO: 3944 - protein, 26 aa, Artificial Sequence
  pCV6
TTPGTMEPSNRFPIPSLDYVTTICLF

SEQ ID NO: 3945 - protein, 32 aa, Artificial Sequence; identical to SEQ ID NO: 527
  pCV6

SEQ ID NO: 3946 - protein, 19 aa, Artificial Sequence
  pCV6
LGDWRDCDCNGLYCRLDVA

SEQ ID NO: 3947 - protein, 42 aa, Artificial Sequence; identical to SEQ ID NO: 529
  pCV6

SEQ ID NO: 3948 - protein, 22 aa, Artificial Sequence
  pCV6
TCHWCCDHSWSLANGRTLPRAL

SEQ ID NO: 3949 - protein, 27 aa, Artificial Sequence
  pCV6
GPAKRDHCGYITNAFLLQIRSVAACRH

SEQ ID NO: 3950 - protein, 14 aa, Artificial Sequence
  pCV6
FRFCCIQPLPYWKL

SEQ ID NO: 3951 - protein, 7 aa, Artificial Sequence
  pCV6
IKYRPRR

SEQ ID NO: 3952 - protein, 23 aa, Artificial Sequence
  pCV6
QRQYCFASTVRIQAEFQHTGGRY

SEQ ID NO: 3953 - protein, 7 aa, Artificial Sequence
  pCV6
WIRALIN

SEQ ID NO: 3954 - protein, 6 aa, Artificial Sequence
  pCV6
GFSANI

SEQ ID NO: 3955 - protein, 35 aa, Artificial Sequence; identical to SEQ ID NO: 206
  pCV6

SEQ ID NO: 3956 - protein, 11 aa, Artificial Sequence
  pCV6
RRDLVSFLALS

SEQ ID NO: 3957 - protein, 21 aa, Artificial Sequence
  pCV6
LVKCRVGTNSPNLRPTIGFVM

SEQ ID NO: 3958 - protein, 8 aa, Artificial Sequence
  pCV6
IGICSFPL

SEQ ID NO: 3959 - protein, 37 aa, Artificial Sequence; identical to SEQ ID NO: 210
  pCV6

SEQ ID NO: 3960 - protein, 12 aa, Artificial Sequence
  pCV6
WYLPPPRSNGNG

SEQ ID NO: 3961 - protein, 9 aa, Artificial Sequence
  pCV6
EACGIDVIG

SEQ ID NO: 3962 - protein, 11 aa, Artificial Sequence
  pCV6
GWLYCWWRTPG

SEQ ID NO: 3963 - protein, 275 aa, Artificial Sequence; identical to SEQ ID NO: 214
  pCV6

SEQ ID NO: 3964 - protein, 13 aa, Artificial Sequence
  pCV6
LETKWIKLDRKKV

SEQ ID NO: 3965 - protein, 23 aa, Artificial Sequence
  pCV6
IKKKRNRKIKNQLRKCSNSSFFF

SEQ ID NO: 3966 - protein, 9 aa, Artificial Sequence
  pCV6
LIAIKLVSI

SEQ ID NO: 3967 - protein, 10 aa, Artificial Sequence
  pCV6
KKIEPSLNRF

SEQ ID NO: 3968 - protein, 5 aa, Artificial Sequence
  pCV6
YDHET

SEQ ID NO: 3969 - protein, 18 aa, Artificial Sequence
  pCV6
QIGIPLFYIFRRYKGIIQ

SEQ ID NO: 3970 - protein, 4 aa, Artificial Sequence
  pCV6
INTI

SEQ ID NO: 3971 - protein, 5 aa, Artificial Sequence
  pCV6
KLDDP

SEQ ID NO: 3972 - protein, 35 aa, Artificial Sequence; identical to SEQ ID NO: 223
  pCV6

SEQ ID NO: 3973 - protein, 11 aa, Artificial Sequence
  pCV6
NRTLIYYLFFY

SEQ ID NO: 3974 - protein, 9 aa, Artificial Sequence
  pCV6
ILDLLVIRY

SEQ ID NO: 3975 - protein, 40 aa, Artificial Sequence; identical to SEQ ID NO: 226
  pCV6

SEQ ID NO: 3976 - protein, 8 aa, Artificial Sequence
  pCV6
RGFQHINI

SEQ ID NO: 3977 - protein, 16 aa, Artificial Sequence
  pCV6
SVPPDSELFFNTHNPY

SEQ ID NO: 3978 - protein, 12 aa, Artificial Sequence
  pCV6
LIILVIGFLCLV

SEQ ID NO: 3979 - protein, 7 aa, Artificial Sequence
  pCV6
EIRYSNK

SEQ ID NO: 3980 - protein, 4 aa, Artificial Sequence
  pCV6
FYSE

SEQ ID NO: 3981 - protein, 36 aa, Artificial Sequence; identical to SEQ ID NO: 232
  pCV6

SEQ ID NO: 3982 - protein, 20 aa, Artificial Sequence
  pCV6
INQWAVLVLLKIPMKIQIEK

SEQ ID NO: 3983 - protein, 35 aa, Artificial Sequence; identical to SEQ ID NO: 234
  pCV6

SEQ ID NO: 3984 - protein, 28 aa, Artificial Sequence
  pCV6
LVIGMETVIPSILILKIIFLRLTTIILF

SEQ ID NO: 3985 - protein, 52 aa, Artificial Sequence; identical to SEQ ID NO: 236
  pCV6

SEQ ID NO: 3986 - protein, 4 aa, Artificial Sequence
  pCV6
ILPL

SEQ ID NO: 3987 - protein, 39 aa, Artificial Sequence; identical to SEQ ID NO: 238
  pCV6

SEQ ID NO: 3988 - protein, 8 aa, Artificial Sequence
  pCV6
EKVLMISR

SEQ ID NO: 3989 - protein, 16 aa, Artificial Sequence
  pCV6
LKNTGICGFNAKIVMD

SEQ ID NO: 3990 - protein, 5 aa, Artificial Sequence
  pCV6
IIRNF

SEQ ID NO: 3991 - protein, 9 aa, Artificial Sequence
  pCV6
IFVNNVDII

SEQ ID NO: 3992 - protein, 34 aa, Artificial Sequence; identical to SEQ ID NO: 243
  pCV6

SEQ ID NO: 3993 - protein, 54 aa, Artificial Sequence; identical to SEQ ID NO: 244
  pCV6

SEQ ID NO: 3994 - protein, 28 aa, Artificial Sequence
  pCV6
LAALGRSAAASGISSLKGGNTVIHRIRG

SEQ ID NO: 3995 - protein, 16 aa, Artificial Sequence
  pCV6
RRKEHVSKRPAKGQEP

SEQ ID NO: 3996 - protein, 9 aa, Artificial Sequence
  pCV6
KGRVAGVFP

SEQ ID NO: 3997 - protein, 4 aa, Artificial Sequence
  pCV6
APPP

SEQ ID NO: 3998 - protein, 57 aa, Artificial Sequence; identical to SEQ ID NO: 249
  pCV6

SEQ ID NO: 3999 - protein, 29 aa, Artificial Sequence
  pCV6
VSQFGVGRSLQAGLCARTPRSARPLRLIR

SEQ ID NO: 4000 - protein, 16 aa, Artificial Sequence
  pCV6
VQPGKTRLIATGSSHW

SEQ ID NO: 4001 - protein, 16 aa, Artificial Sequence
  pCV6
QSEVCRRCYRVLEVVA

SEQ ID NO: 4002 - protein, 4 aa, Artificial Sequence
  pCV6
LRLH

SEQ ID NO: 4003 - protein, 20 aa, Artificial Sequence
  pCV6
KDSIWYLRSAEASYLRKKSW

SEQ ID NO: 4004 - protein, 10 aa, Artificial Sequence
  pCV6
LLIRQTNHRW

SEQ ID NO: 4005 - protein, 28 aa, Artificial Sequence
  pCV6
RWFFCLQAADYAQKKRISRRSFDLFYGV

SEQ ID NO: 4006 - protein, 32 aa, Artificial Sequence; identical to SEQ ID NO: 257
  pCV6

SEQ ID NO: 4007 - protein, 6 aa, Artificial Sequence
  pCV6
INLKYI

SEQ ID NO: 4008 - protein, 4 aa, Artificial Sequence
  pCV6
VNLV

SEQ ID NO: 4009 - protein, 7 aa, Artificial Sequence
  pCV6
QLPMLNQ

SEQ ID NO: 4010 - protein, 75 aa, Artificial Sequence; identical to SEQ ID NO: 261
  pCV6

SEQ ID NO: 4011 - protein, 5 aa, Artificial Sequence
  pCV6
LLPGS

SEQ ID NO: 4012 - protein, 44 aa, Artificial Sequence; identical to SEQ ID NO: 263
  pCV6

SEQ ID NO: 4013 - protein, 10 aa, Artificial Sequence
  pCV6
LLRSSDRCQK

SEQ ID NO: 4014 - protein, 14 aa, Artificial Sequence
  pCV6
VGRSVITHGYGSTA

SEQ ID NO: 4015 - protein, 15 aa, Artificial Sequence
  pCV6
FSYCHAIRKMLFCDW

SEQ ID NO: 4016 - protein, 24 aa, Artificial Sequence
  pCV6
VLNQVILRIVYAATELLLPGVNTG

SEQ ID NO: 4017 - protein, 4 aa, Artificial Sequence
  pCV6
YRAT

SEQ ID NO: 4018 - protein, 95 aa, Artificial Sequence; identical to SEQ ID NO: 269
  pCV6

SEQ ID NO: 4019 - protein, 5 aa, Artificial Sequence
  pCV6
MYLEK

SEQ ID NO: 4020 - protein, 14 aa, Artificial Sequence
  pCV6
TNRGSAHISPKSAT

SEQ ID NO: 4021 - protein, 12 aa, Artificial Sequence
  pCV6
RLRNHYYHDINL

SEQ ID NO: 4022 - protein, 7 aa, Artificial Sequence
  pCV6
AYHEALS

SEQ ID NO: 4023 - DNA, 666 bp, SARS-CoV Virus
atggcagacaacggtactattaccgttgaggagcttaaacaactcctggaacaatggaacctagtaataggtttcctattcctagcctggattatgttactacaatttgcctattctaatcggaacaggtttttgtacataataaagcttgttttcctctggctcttgtggccagtaacacttgcttgttttgtgcttgctgctgtctacagaattaattgggtgactggcgggattgcgattgcaatggcttgtattgtaggcttgatgtggcttagctacttcgttgcttccttcaggctgtttgctcgtacccgctcaatgtggtcattcaacccagaaacaaacattcttctcaatgtgcctctccgggggacaattgtgaccagaccgctcatggaaagtgaacttgtcattggtgctgtgatcattcgtggtcacttgcgaatggccggacactccctagggcgctgtgacattaaggacctgccaaaagagatcactgtggctacatcacgaacgctttcttattacaaattaggagcgtcgcagcgtgtaggcactgattcaggttttgctgcatacaaccgctaccgtattggaaactataaattaaatacagaccacgccggtagcaacgacaatattgctttgctagtacagtaa

SEQ ID NO: 4024 - protein, 221 aa, SARS-CoV Virus
MADNGTITVEELKQLLEQWNLVIGFLFLAWIMLLQFAYSNRNRFLYIIKLVFLWLLWPVTLACFVLAAVYRINWVTGGIAIAMACIVGLMWLSYFVASFRLFARTRSMWSFNPETNILLNVPLRGTIVTRPLMESELVIGAVIIRGHLRMAGHSLGRCDIKDLPKEITVATSRTLSYYKLGASQRVGTDSGFAAYNRYRIGNYKLNTDHAGSNDNIALLVQ

SEQ ID NO: 4025 - DNA, 3768 bp, SARS-CoV Virus
atgtttattttcttattatttcttactctcactagtggtagtgaccttgaccggtgcaccacttttgatgatgttcaagctcctaattacactcaacatacttcatctatgaggggggtttactatcctgatgaaatttttagatcagacactctttatttaactcaggatttatttcttccattttattctaatgttacagggtttcatactattaatcatacgtttggcaaccctgtcataccttttaaggatggtatttattttgctgccacagagaaatcaaatgttgtccgtggttgggtttttggttctaccatgaacaacaagtcacagtcggtgattattattaacaattctactaatgttgttatacgagcatgtaactttgaattgtgtgacaaccctttctttgctgtttctaaacccatgggtacacagacacatactatgatattcgataatgcatttaattgcactttcgagtacatatctgatgccttttcgcttgatgtttcagaaaagtcaggtaattttaaacacttacgagagtttgtgtttaaaaataaagatgggtttctctatgtttataagggctatcaacctatagatgtagttcgtgatctaccttctggttttaacactttgaaacctatttttaagttgcctcttggtattaacattacaaattttagagccattcttacagccttttcacctgctcaagacatttggggcacgtcagctgcagcctattttgttggctatttaaagccaactacatttatgctcaagtatgatgaaaatggtacaatcacagatgctgttgattgttctcaaaatccacttgctgaactcaaatgctctgttaagagctttgagattgacaaaggaatttaccagacctctaatttcagggttgttccctcaggagatgttgtgagattccctaatattacaaacttgtgtccttttggagaggtttttaatgctactaaattcccttctgtctatgcatgggagagaaaaaaaatttctaattgtgttgctgattactctgtgctctacaactcaacatttttttcaacctttaagtgctatggcgtttctgccactaagttgaatgatctttgcttctccaatgtctatgcagattcttttgtagtcaagggagatgatgtaagacaaatagcgccaggacaaactggtgttattgctgattataattataaattgccagatgatttcatgggttgtgtccttgcttggaatactaggaacattgatgctacttcaactggtaattataattataaatataggtatcttagacatggcaagcttaggccctttgagagagacatatctaatgtgcctttctcccctgatggcaaaccttgcaccccacctgctcttaattgttattggccattaaatgattatggtttttacaccactactggcattggctaccaaccttacagagttgtagtactttcttttgaacttttaaatgcaccggccacggtttgtggaccaaaattatccactgaccttattaagaaccagtgtgtcaattttaattttaatggactcactggtactggtgtgttaactccttcttcaaagagatttcaaccatttcaacaatttggccgtgatgtttctgatttcactgattccgttcgagatcctaaaacatctgaaatattagacatttcaccttgcgcttttgggggtgtaagtgtaattacacctggaacaaatgcttcatctgaagttgctgttctatatcaagatgttaactgcactgatgtttctacagcaattcatgcagatcaactcacaccagcttggcgcatatattctactggaaacaatgtattccagactcaagcaggctgtcttataggagctgagcatgtcgacacttcttatgagtgcgacattcctattggagctggcatttgtgctagttaccatacagtttctttattacgtagtactagccaaaaatctattgtggcttatactatgtctttaggtgctgatagttcaattgcttactctaataacaccattgctatacctactaacttttcaattagcattactacagaagtaatgcctgtttctatggctaaaacctccgtagattgtaatatgtacatctgcggagattctactgaatgtgctaatttgcttctccaatatggtagcttttgcacacaactaaatcgtgcactctcaggtattgctgctgaacaggatcgcaacacacgtgaagtgttcgctcaagtcaaacaaatgtacaaaaccccaactttgaaatattttggtggttttaatttttcacaaatattacctgaccctctaaagccaactaagaggtcttttattgaggacttgctctttaataaggtgacactcgctgatgctggcttcatgaagcaatatggcgaatgcctaggtgatattaatgctagagatctcatttgtgcgcagaagttcaatggacttacagtgttgccacctctgctcactgatgatatgattgctgcctacactgctgctctagttagtggtactgccactgctggatggacatttggtgctggcgctgctcttcaaataccttttgctatgcaaatggcatataggttcaatggcattggagttacccaaaatgttctctatgagaaccaaaaacaaatcgccaaccaatttaacaaggcgattagtcaaattcaagaatcacttacaacaacatcaactgcattgggcaagctgcaagacgttgttaaccagaatgctcaagcattaaacacacttgttaaacaacttagctctaattttggtgcaatttcaagtgtgctaaatgatatcctttcgcgacttgataaagtcgaggcggaggtacaaattgacaggttaattacaggcagacttcaaagccttcaaacctatgtaacacaacaactaatcagggctgctgaaatcagggcttctgctaatcttgctgctactaaaatgtctgagtgtgttcttggacaatcaaaaagagttgacttttgtggaaagggctaccaccttatgtccttcccacaagcagccccgcatggtgttgtcttcctacatgtcacgtatgtgccatcccaggagaggaacttcaccacagcgccagcaatttgtcatgaaggcaaagcatacttccctcgtgaaggtgtttttgtgtttaatggcacttcttggtttattacacagaggaacttcttttctccacaaataattactacagacaatacatttgtctcaggaaattgtgatgtcgttattggcatcattaacaacacagtttatgatcctctgcaacctgagcttgactcattcaaagaagagctggacaagtacttcaaaaatcatacatcaccagatgttgatcttggcgacatttcaggcattaacgcttctgtcgtcaacattcaaaaagaaattgaccgcctcaatgaggtcgctaaaaatttaaatgaatcactcattgaccttcaagaattgggaaaatatgagcaatatattaaatggccttggtatgtttggctcggcttcattgctggactaattgccatcgtcatggttacaatcttgctttgttgcatgactagttgttgcagttgcctcaagggtgcatgctcttgtggttcttgctgcaagtttgatgaggatgactctgagccagttctcaagggtgtcaaattacattacacataa

SEQ ID NO: 4026 - protein, 1255 aa, SARS-CoV Virus
MFIFLLFLTLTSGSDLDRCTTFDDVQAPNYTQHTSSMRGVYYPDEIFRSDTLYLTQDLFLPFYSNVTGFHTINHTFGNPVIPFKDGIYFAATEKSNVVRGWVFGSTMNNKSQSVIIINNSTNVVIRACNFELCDNPFFAVSKPMGTQTHTMIFDNAFNCTFEYISDAFSLDVSEKSGNFKHLREFVFKNKDGFLYVYKGYQPIDVVRDLPSGFNTLKPIFKLPLGINITNFRAILTAFSPAQDIWGTSAAAYFVGYLKPTTFMLKYDENGTITDAVDCSQNPLAELKCSVKSFEIDKGIYQTSNFRVVPSGDVVRFPNITNLCPFGEVFNATKFPSVYAWERKKISNCVADYSVLYNSTFFSTFKCYGVSATKLNDLCFSNVYADSFVVKGDDVRQIAPGQTGVIADYNYKLPDDFMGCVLAWNTRNIDATSTGNYNYKYRYLRHGKLRPFERDISNVPFSPDGKPCTPPALNCYWPLNDYGFYTTTGIGYQPYRVVVLSFELLNAPATVCGPKLSTDLIKNQCVNFNFNGLTGTGVLTPSSKRFQPFQQFGRDVSDFTDSVRDPKTSEILDISPCSFGGVSVITPGTNASSEVAVLYQDVNCTDVSTAIHADQLTPAWRIYSTGNNVFQTQAGCLIGAEHVDTSYECDIPIGAGICASYHTVSLLRSTSQKSIVAYTMSLGADSSIAYSNNTIAIPTNFSISITTEVMPVSMAKTSVDCNMYICGDSTECANLLLQYGSFCTQLNRALSGIAAEQDRNTREVFAQVKQMYKTPTLKYFGGFNFSQILPDPLKPTKRSFIEDLLFNKVTLADAGFMKQYGECLGDINARDLICAQKFNGLTVLPPLLTDDMIAAYTAALVSGTATAGWTFGAGAALQIPFAMQMAYRFNGIGVTQNVLYENQKQIANQFNKAISQIQESLTTTSTALGKLQDVVNQNAQALNTLVKQLSSNFGAISSVLNDILSRLDKVEAEVQIDRLITGRLQSLQTYVTQQLIRAAEIRASANLAATKMSECVLGQSKRVDFCGKGYHLMSFPQAAPHGVVFLHVTYVPSQERNFTTAPAICHEGKAYFPREGVFVFNGTSWFITQRNFFSPQIITTDNTFVSGNCDVVIGIINNTVYDPLQPELDSFKEELDKYFKNHTSPDVDLGDISGINASVVNIQKEIDRLNEVAKNLNESLIDLQELGKYEQYIKWPWYVWLGFIAGLIAIVMVTILLCCMTSCCSCLKGACSCGSCCKFDEDDSEPVLKGVKLHYT

SEQ ID NO: 4027 - DNA, 39 bp, Artificial Sequence
  Oligomer ML527
catggccgcgcggggttctcatcatcatcatcatcatgg

SEQ ID NO: 4028 - DNA, 39 bp, Artificial Sequence
  Oligomer ML528
catgccatgatgatgatgatgatgagaaccccgcgcggc

SEQ ID NO: 4029 - DNA, 33 bp, Artificial Sequence
  Primer
ggtagtgaccttgacagatgcaccacttttgat

SEQ ID NO: 4030 - DNA, 43 bp, Artificial Sequence
  Primer
gggtttcatactattaatcatacttttggcaaccctgtcatac

SEQ ID NO: 4031 - DNA, 47 bp, Artificial Sequence
  Primer
ccatgaacaacaagtcacagtctgtgattattattaacaattctact

SEQ ID NO: 4032 - DNA, 43 bp, Artificial Sequence
  Primer
agtacatatctgatgccttttctcttgatgtttcagaaaagtc

SEQ ID NO: 4033 - DNA, 45 bp, Artificial Sequence
  primer
cctatagatgtagttcgtgatcttccttctggttttaacactttg

SEQ ID NO: 4034 - DNA, 33 bp, Artificial Sequence
  Primer
caagacatttggggcacttcagctgcagcctat

SEQ ID NO: 4035 - DNA, 35 bp, Artificial Sequence
  Primer
gatgatgtaagacaaatagctccaggacaaactgg

SEQ ID NO: 4036 - DNA, 41 bp, Artificial Sequence
  primer
tcttttgaacttttaaatgcacctgccacggtttgtggacc

SEQ ID NO: 4037 - DNA, 41 bp, Artificial Sequence
  Primer
cttttaaatgcacctgccactgtttgtggaccaaaattatc

SEQ ID NO: 4038 - DNA, 43 bp, Artificial Sequence
  Primer
cttcatctgaagttgctgttctttatcaagatgttaactgcac

SEQ ID NO: 4039 - DNA, 43 bp, Artificial Sequence
  primer
caactcacaccagcttggagaatatattctactggaaacaatg

SEQ ID NO: 4040 - DNA, 33 bp, Artificial Sequence
  Primer
atcaaaagtggtgcatctgtcaaggtcactacc

SEQ ID NO: 4041 - DNA, 43 bp, Artificial Sequence
  Primer
cattgtttccagtagaatatattctccaagctggtgtgagttg

SEQ ID NO: 4042 - DNA, 21 bp, Artificial Sequence
  Primer
cagagagagtttcccggattc

SEQ ID NO: 4043 - DNA, 20 bp, Artificial Sequence
  Primer
caacctatagatgtagttcg

1. A vector comprising an isolated nucleic acid which nucleic acid sequence is set forth in SEQ ID NO:708 or 709, or a fragment, derivative or analog thereof.

2. The vector in accordance with claim 1, wherein the vector is a plastid transformation vector.

3. The vector in accordance with claim 2, wherein the vector is pCV1, pCV6, pCV8, or a derivative thereof containing an S1 with at least one nucleotide change.

4. The vector in accordance with claim 1, wherein the vector is a nuclear transformation vector.

5. The vector in accordance with claim 4, wherein the vector is pCV2, pCV4, pCV12, or a derivative thereof containing an S1 with at least one nucleotide change.

6. The vector in accordance with claim 1, wherein the isolated nucleic acid encodes the S protein of the SARS-CoV virus, the M protein of the SARS-CoV virus, or both.

7. The vector in accordance with claim 1, wherein the isolated nucleic acid comprises the nucleic acid sequence as set forth in SEQ ID NO:4023, 4025, or a fragment, derivative or analog thereof.

8. The vector in accordance with claim 1, wherein the isolated nucleic acid encodes the amino acid sequence as set forth in SEQ ID NO:4024 or 4026, or a fragment, derivative or analog thereof.

9. The vector in accordance with claim 1, wherein the isolated nucleic acid hybridizes under high stringency conditions to the nucleic acid sequence of SEQ ID NO:4023, 4025, 708, or 709, or a complement thereof.

10. A plant cell comprising an isolated nucleic acid which nucleic acid sequence is set forth in SEQ ID NO:708, 709, or a fragment, derivative or analog thereof.

11. The plant cell in accordance with claim 10, wherein the isolated nucleic acid encodes the S protein of the SARS-CoV virus, the M protein of the SARS-CoV virus, or both.

12. The plant cell in accordance with claim 10, wherein the isolated nucleic acid comprises the nucleic acid sequence as set forth in SEQ ID NO:4023, 4025, or a fragment, derivative or analog thereof.

13. The plant cell in accordance with claim 10, wherein the isolated nucleic acid encodes the amino acid sequence as set forth in SEQ ID NO:4024 or 4026, or a fragment, derivative or analog thereof.

14. The plant cell in accordance with claim 10, wherein the isolated nucleic acid hybridizes under high stringency conditions to the nucleic acid sequence of SEQ ID NO:4023, 4025, 708, or 709, or a complement thereof.

15. The plant cell in accordance with claim 10, wherein the plant cell is isolated from a plant selected from the group consisting of tobacco, lettuce, tomato, potato, banana, corn, rice, cereals, wheat, maize, barley, apple, pear, strawberry, carrot, sugar beets, yam, kiwifruit, or spinach.

16. A plant cell comprising the vector in accordance with claim 1.

17. A method of immunization against SARS comprising administering to a subject a plant, wherein the plant comprises an isolated nucleic acid which nucleic acid sequence is set forth in SEQ ID NO:708, 709, or a fragment, derivative, analog, or vector thereof.

18. The method in accordance to claim 17, wherein the isolated nucleic acid encodes the S protein of the SARS-CoV virus, the M protein of the SARS-CoV virus, or both.

19. The method in accordance to claim 17, wherein the isolated nucleic acid comprises the nucleic acid sequence as set forth in SEQ ID NO:4023, 4025, or a fragment, derivative or analog thereof.

20. The method in accordance to claim 17, wherein the isolated nucleic acid encodes the amino acid sequence as set forth in SEQ ID NO:4024 or 4026, or a fragment, derivative or analog thereof.

21. The method in accordance to claim 17, wherein the isolated nucleic acid hybridizes under high stringency conditions to the nucleic acid sequence of SEQ ID NO:4023, 4025, 708, or 709, or a complement thereof.

22. The method in accordance to claim 17, where the administering to the subject is oral administration.

23. The method in accordance to claim 17, wherein subject is human.

24. A method of immunization against SARS comprising administering to a subject a vector in accordance with claim 1 and an acceptable pharmaceutical carrier.

25. The method in accordance to claim 24, wherein the subject is human.

26. A plant comprising the isolated nucleic acid which nucleic acid sequence is set forth in SEQ ID NO:708, 709, or a fragment, derivative or analog thereof.

27. The plant in accordance with claim 26, which is selected from the group consisting of tobacco, lettuce, tomato, potato, banana, corn, rice, cereals, wheat, maize, barley, apple, pear, strawberry, carrot, sugar beets, yam, kiwifruit, or spinach.

28. A composition comprising a SARS-CoV viral antigen produced by the plant cell of claim 10.

29. A composition comprising a SARS-CoV viral antigen produced by the plant cell of claim 16.

30. A composition comprising a SARS-CoV viral antigen produced by the plant of claim 26.

31. A method of detecting an antibody to a SARS-CoV viral antigen in a sample comprising:
(a) contacting the sample with the composition of claim 28; and
(b) detecting the presence of an antibody bound to the composition of claim 28, thereby detecting an antibody to a SARS-CoV viral antigen.

32. The method in accordance with claim 31, wherein the sample is a biological fluid.

33. The method in accordance with claim 32, wherein the biological fluid is blood, serum, plasma, saliva, urine, stool, sputum, nasopharyngeal aspirates, cells or tissues.

34. A method of detecting an antibody to a SARS-CoV viral antigen in a sample comprising:
(a) contacting the sample with the composition of claim 29; and
(b) detecting the presence of an antibody bound to the composition of claim 29, thereby detecting an antibody to a SARS-CoV viral antigen.

35. The method in accordance with claim 34, wherein the sample is a biological fluid.

36. The method in accordance with claim 35, wherein the biological fluid is blood, serum, plasma, saliva, urine, stool, sputum, nasopharyngeal aspirates, cells or tissues.

37. A method of detecting an antibody to a SARS-CoV viral antigen in a sample comprising:
(a) contacting the sample with the composition of claim 30; and
(b) detecting the presence of an antibody bound to the composition of claim 30, thereby detecting an antibody to a SARS-CoV viral antigen.

38. The method in accordance with claim 37, wherein the sample is a biological fluid.

39. The method in accordance with claim 38, wherein the biological fluid is blood, serum, plasma, saliva, urine, stool, sputum, nasopharyngeal aspirates, cells or tissues.
